United States Patent Application Publication US 2024/0117295 A1 - sequence listing, part 6

SEQ ID NO: 5 - DNA, 3977413 bp, Artificial Sequence (residues 1,988,708-3,977,413 of 3,977,413)
  Synthetic E.coli genome
cgtccgtttacctttggtgactggctggtattgattgtcctgaccgccgtaatggtctgggtgatttggggcgtgatcgttaatgcctggtttattccagaaattgccagccagttcttcaccatgggtctggtgattggcatcatcggcgttgttttccgccttaacggcatgacggttaataccatggctagttcctttaccgaaggggcgcgaatgatgatcgcccctgccctgctggtgggtttcgccaaagggattttgctgctggtcggtaatggtgaagcgggtgatgccagcgtgttaaataccatcctcaacagcattgccaatgccattagcggtctggacaacgcggtcgcggcctggtttatgttgctcttccaggcggtatttaatttcttcgtgacgtccggttctggtcaggcggcgttaaccatgccgttactggcaccgcttggcgatctggtcggtgttaaccgtcaggttaccgtgctggcgttccagtttggtgatggcttcagtcacatcatttacccaaccagtgcgagcttaatggcaacgctcggtgtgtgcagggtggacttccgtaactggctgaaggtgggcgcgaccctacttggactgctgtttattatgtccagcgtcgtagtgatcggcgctcagttgatgggctaccactaaaaatgttaagagccgcaattgcggctcttttttcattctgccgtttcagtctctacggcttcatttttggcattgcgcttcatccacaacgctagcgctttcaggctgtctggagtgaactcatcgcagcgtgcggtgatttcttccggcgtcagccagcaaacttcactgacttcatcttcctgtagtgcgaagggaccgtgagagacgcagctgaacaatgcgccccagacacggcaatttttatcttcgaaatagaactgcccgtgctcggcaaaggggacaccggcaatgcccaactcttcttccgcttcgcgacgcgcggattccagcagttgctcatcggcctggactacaccgcctgcggtcgcatctaacatgccgggtaaaaagtcttttgtctcggtacgacgctggaccagaattttgcccatgccatcatgcacgacgatgtaagttgcacgatgacgcagacactgtgcccgcatttgttcccggctggcttgtgcaatgacttcgttctcttcattgacaatatccacccattcagtacttgccaaacgacgctgttccattatcaggaaaccttctttttctggcgctcttacggcgcattttgagttgtgggtaaattacggattaatcgcgacctgcgcaatgatactttgatcattgagtgcgattacactaagtacgtcattatccagcatgccataactcgccggattaccgcctttcggaatactcacgctgccggggttgaagtggaaaatctccccccgctgttctgccactggcagatgggtatgaccgtacaccagcacatcgttctggtttaaagcaggcagattttccgggccaaaaagatgaccatgcgtcaaaaacagacgttgtttttccagtaatacctgttgccacggcgcggttatcgggaaatgcagcagcatttgatccacttcgctgtcgcagttgccgcgcacagcgataaccttatgtgccacttcattaagccgttcagcgactttggctggcgcgtaaccctccggtaaagcattacgcgggccgtgattcaacacgtcgccaaggatcaccagccactgggcaccgctttgggcaaacaactccagaacacgttccgtcgccggtaagctcccatgaatgtcgcttgcaaacatcagtttcatcactcactcctcgtcgaaaaaacgtaagctatgatactggattctgtcgttgctatcagccagattgcttcgcgctaagtgcaataaaacgctggacagacgctcgctgccactggaatgttgcataatccaccaggcgttctggcacctcatcgccatgtagtaccaggcggttaatcattagcgccagatcagtatcagcaatgcaccattcaccaaataaattcggctgacccagtactaacaaatgttctgccatcgcgaacagtttctctgcactggcttttccctcggccgttagtggcgcttttttcgcccccgcaaagacaacatccgtcggacgctcttcgcggatgggcatcagatcgctgcgcagccaggcctgaatctgtcgtgcacgcgcacgattttctaaatcaagcggataaatacgttcccaggtcggtggcgcaaatcgatcttccagatactccgcaatggcagaagattcactcaactcaaaatcatcgatttgtaataacggcacacggcgtgtctgaccgtaaccttgccacgtcggctgcaaatgttcaccgctgtcgaggtcgatggtcttgatatgaaagctcaggcctttttcctgcaacgccacccaggcggataacacataaggggagaaaaagtgggcatcactccaaagcgtgatagcgggtttactcattatgtcctcggcaataaagggggctggctatcaaactatagagcctttttgtcactgtcacgtgacgaatactcacgtaagtcgccgcgctttctatacttgtggtgttcagatgattaaacaaccggagctgcaatgatcgatctctatttcgccccgacacccaatggtcacaaaattacgctgtttctcgaagaagcagagctggattatcgcttgattaaggtagacctggggaaaggcggtcagtttcgtccggaatttttgcgcattagccccaacaacaaaattccggcaattgttgatcattctcctgccgatggcggcgaaccgctaagcctctttgagtctggtgccattttgttgtatctggctgagaaaacaggactctttttgagtcatgaaacgcgtgagcgcgccgccacattacagtggttattctggcaggtaggcggactggggccgatgcttgggcaaaatcatcattttaatcacgcagccccccaaaccattccttacgctattgaacgttatcaggttgaaactcagcgtctttaccatgtactgaacaagcggctggaaaacagcccctggctgggaggcgagaactacagcattgcggatattgcctgctggccgtgggttaatgcctggactcgccagcgaattgacctagcaatgtatccggcagtcaagaactggcatgagcggatccgtagccgccctgccaccgggcaggcactgctaaaagcacaactcggtgatgagcgtagcgatagttaacagaaacaggttctcgtgtattatttcatcctaagtaaaacaacggagaacctgcaatggcacaacctgccgctattattcgtataaagaaccttcgtttgcgtacgtttatcggaattaaggaagaagaaattaacaaccgtcaggatattgttatcaatgtgacgatccactaccccgccgataaagcgcgcactagcgaagatatcaacgatgcgctgaattatcgcaccgtaacgaaaaacattattcagcatgtagagaataaccgtttctctttgctggaaaaattaactcaggatgtgctcgatatcgcacgtgaacatcactgggtgacgtatgctgaagtggagatcgataaactgcacgcgctgcgctacgccgatagcgtatccatgaccttaagctggcagcgttaatcgccatatcgggaggctgcatgaacatagtgatcaccggagggacaggattaattggtcgccatttgattccgcgtttgctggagctgggccatcaaattacggtagtgacgcgtaacccgcagaaagccagttccgttctcggccctcgggtgacactatggcaagggcttgccgatcaaagcaacctcaacggcgttgatgcggtaatcaacctggccggagaaccgattgctgataaacgctggactcacgagcaaaaagagcgtctctgccaaagccgctggaatatcacgcaaaaactggtcgatttgattaatgccagcgacacgccaccgagcgtactcatttccggcagcgcaacgggctattatggtgacttaggtgaagtggtggttaccgaagaggaaccgccgcataacgaatttacccataaactctgcgctcgctgggaagaaattgcctgccgggcgcaaagtgacaaaacgcgagtgtgcctgctgcgtaccggtgtagtgctggcaccggatggcggtattctcggtaaaatgctgccgccgtttcgtcttggcctgggcgggccgattggctctggtcggcagtatctggcctggattcatattgatgatatggtcaacggtattctctggctgctggataacgagctgcgcgggccatttaatatggttagcccctacccggtacgcaatgaacaatttgcccatgcgctcggtcatgcgctgcatcgcccggccattttgcgcgtccccgcgaccgccattcgactgttaatgggcgaatctagtgtactggtattaggtggacaacgcgcgctgcctaaacggctggaagaagcgggttttgcgtttcgctggtacgatttagaagaggcgctggcggatgtcgttcgctgatgtggtttacagcaaacatccgccagttaactcccggtgttacaggattagtggctttgcgcgataagatcgtctggactaagtcgggtcaccatcataactaactctctgtctaaacctctatccagcatctcctgagcaatacgcagggcttcttcgtgtttgccctgcattgcgccttcttcacgtaatctgtcagcaatggtcatcagtttctccttttcttgtggtgcgcgttccgctatctcaccaataaatgcacgaaaacgctgggcatcccctgtttgtaatacgtaattaaacagggcttttagctgtctgtcattagtgttccctgtaactagcaggctaacaatttggtcgactaatcccaacagatcgcgctgacgaatatgtttctgaattaactccaacagcgccattttgcggtgttgcataatctcgtcatccggcaccacggtaatatccaccaacggaaaagcgctactatatattttgcgggctatagcaggctcggcaaattcatcaagccagcagagactataaggataaggacttctgcaaccatgataaaacagcatcgggagcaccaatggaagctctttatagcccgcatcaagatggttttgcattgccgcaatggaataacgcatcatgcgaaaagccattaattcttccggcttactttggtgctctatcactacataaatataacccactccctcctgcgttttcacagaccacaagaggtcggaataatattgccgcaggtcttcatcaataaaactgtttggttccagtttaagcgtcgttaaatcacacagtttgcgcagcggcgcgggaagatgaatatcaataaaatcccgcgcggtgtctggatggcgtaaaaaagatttaaataccgcatcatgcggcgtggaagttgtgcttattgtcatggcgttccgtcacccctcaaatttaagatgacgcgacaataaccacgattaacacccaatgcagcaggcagtttttatctttggacagcgaattcagaagtatttttagcggactgtaacttttacatttcagcggaagctgactcgcaaattccccatgaaaatactccggcagcgttagccaccggagaggaaattatttcaggcttcccttaaggaaccgttgcagacgagggctttgcgggttgccaaataactgctccggcgcgccctcttcttctattttcccctgatggaggaaaatgacatgagtagaaacatggcgagcaaagcccatttcgtgagtcactaccaccatggttttcccctcttctgccagttgctgcataatacgcaacacttcgcctaccagttcaggatcgagcgcgctggtaggttcatcaaacagtaaaacttccggttccatcgccagcgcccgcgcgatagaaacacgctgttgctgaccgccggaaagatgcaccggatatttcccctgcgcacgttcgtctatcccgacttttgccagatacttcaccgcccgctcgcgcgcttcctgcttgctcaggcccaacacctgaatcggcgcttccatgacgttttccagcaccgtcatatggctccagagattgaagtgctggaataccatcgtcaggcgtgtgcgcagtaagcgcagttgatttttatcggcgactttgagttgaccgtctttgtcgcgcaccagattgatcgtctggccattgaccacgatgctcccttcactcggtttttcgaggaagttaatgcagcgcagaaaggtacttttcccgcttccgctgcttccgatgatgcttattacatctccggcattcgcttgcagacttacccctttcagcacttcatgttcgccgtagcgtttgtgcaaatcgataacgtttaatttattctcggacatcgtattctcagtgcgtactagaaggtttcacatgctgcaaccagcgtttttccgctctgcgaaagaggctgatcaggacataagagatgattaaatagagcaccgcggcaatgccgaaggcggtaaaaggttgatacgtggcggcgttaatatcgcgggctattttcagcagatccggcaccgtggcagtaaatgccaacgcagtagagtgcagcatcaggatcacttcgttgctgtatgccggtaacgcaatacgcagcgcagaaggcaaaataatgcagcgatacattttaaaagtgctgaagccataggctctggcggcttcaatttccccatgcggaacgctacggattgccccagcaaaaatctcggtagtgtaagcgcaggtgttaagcgtcagcgccagcacggtacagttcaggccactgcggaagaaagcgttaaggaattcggttcccttaacaatctcaagcgtgtacatgccggaatagaacaccagcaactgaacatacagcggcgtaccgcgaaaaatataggtaaataaccagattggaaactggatgtatttattactggagacacgaccaatcgccagaaacagcgccaggactccgcctatcactacgctcaaaataagcagccacagagtgatcgccacaccagtaaagcgataaccgtcggtccacagcagcggtttccagtattcatgtaagatttcgatcacaggtcagccctcttcacacccacggagtagcggcgctcaaggaacagcagcacaccattggaaacagtggtgaaaaccaggtaaatcacgccacagacgatggcgaaatagaacggttcccaggtacttttgcctgccagttgggtggctttgaccacatcttccaggccgagtaagctaaccagtgcggtagatttgaggatcacctgccagttgttgccaatgcctggcagggcgtaacgcatcatgctcggaaacatgatccgccgaaacacttgcccacgagtaaaaccgaacgccgtcgccgcctctatatgtcctttcggcactgccataaaagcaccacggaacgtttcggtaaaataagcaccgtagataaaaccgagagtgataataccagcgaccatcggatcgatatcaatctgcccgacgcccatcgcctccgtcaccgtgtttagcgcaatctgcaaaccgtagaaaatcagcagcatcaacactaagtccggcacgccacgaatcagcgtggtgtacccttcgaaaatcagcccgctaagccgattttggctgagcttaccgccagcgccaattaaaccgatgattacagcgagcactacagagctgatagccagctccagcgtgacgagcgcaccctgtaaaataacaccactaaacccatacaacatgctgcctgtcctgtcgtgtgtggtgaattaccgcctcttgtctccctccggttacccgaagggagcgggctttctttcaccgatggcgattagccaccataaacatcaaaatcgaagtactttttcgctaatttctcgtaagtaccgtcagcgcgcatttcggcaaaggctttgttcagtgcttcgcgcagttcgttatcttctttacgcaggcccatgccggtccctacgccaaacagtttttcatctttaacagacgggccaccgaatttgtaatctttaccgacaggttgtttgaggaaaccttcgctggcagcgacctcatcctggaacgcggcatcaatacgtccggcagtcaggtcagaataaatgttgtcctgcccctgatagctgacgatttcaatgccttttggtgcccaatgttcattaccgaacgtctcctgggtggtgccctgcaatacgcctacccgtttgcctttcaggctctcgactgtcggctgaatgtcagaatttttcgccaccaccaaacgagaatcggcagcgtacagtttgtcggtgaaggctatttcttgctgacgtttttccgtaatggaaaggctactcatgatggcgtcaatcttcttcgcttttaaggacgggattaacgcatccagcggattttcgacaaacgtacattgcgtattgatgcgtttgcataattcctttgccagatcgatatcgaagccaaccagttcgccttgactatttttactttcaaatggcgcataggtcgggtcggtaccgatgcggatgttttgcggaatcgcagcaaacgccgcagttgcgctggagaaggccagaaccagagagaggcttagcaccagttttttcataatgtcctcaactgacagtctttttatagggaatatttacaggtttgttacacttatcgtgccataaaattgaccatcaaggcaaaatatcccgccccgttagacgtattatttttcattaaaaatgcttaagtatgcatttcaatgcaccacgatagtgcaacaaacctggcgtgcaccatgatgatcattccatcaggtacagcttcccagcgacgtatcagtcaccgtagacattaaagtcgaaatactttttcgccatcttgtcgtaggtgccgtcctgacgcagctcgccaagcgccttattgaaggcagccgtcagttcagcatcatctttacgtagccctacaccggtgccatcaccgaagtattttttgtcttttacactactgccagcaaaggcgaaatctttaccagcaggttgcttgaggaatccttcgctggcagcaacttcatcttgtaacgcagcatccagacgtcctgcagccagatcggaatagaccaaatcctggttggcataggccaccacatccacgcctttactacgccaggtctcgttagcgtaagcttcctgggtacttccctgcagcacaccaacatgtttacctttcagactatccagcgttggctgaatcggactacctttggccgcaatcaaacgagaatctgcggcgtacagcttgtcggagaaggcaatctcctgctgacgtttatcggtaatggaaaggctgctaataatagcgtcgatttttttcgctttcagactggggatcagcgcgtcaaagtcactggcaacccaggtacatttcacctgcatccgtttgcacatctcgttaccgagatcgatatcaaagccaacaaaatcacctttagcatctttgctactgaacggtgcgtaggtggtatcggttccgatacgtaccgtctccggtagcgccgcatagctggaagccgctgtggagagaccgactaacaaagacagagcgagaatgctcttcttcatacataaccctcaagtgaaaatggcttttttatgttgtgtattgtgttgtgtgtttgcaggctctttcatgcaggtcttatgccatcttgacgacaacagtaacattcaacgttaaatatgttaataagacgttgcattattgtcctgaagttgaagatagcaggtatagcggttgaatcgcagcgtttcgattgaatggcagaaacaaaatgtcgaggatttgatcgcggttgcaaaattgccctgaaacagggcaacagcggagttatgcgccctgccagcgggcaaagagatcttcaggaagggttatcgcaaactggtcaagaacacgattaaccgtctgatttatcacatcatcaagggattgcgggcgatgataaaacgccggaacgggaggcataatcaccgcaccgatttctgccgcctgagtcattaaacgcagatggcctaagtgcaatggtgtttcacgcacgcagagcaccaacgggcgacgctctttcagcaccacatctgccgcacgggtcagtaagccatcagtatagctatggacaatgccggaaagggttttgatactacagggtaaaatcaccatccccagcgtctggaaagaaccggaagagatgctggcggcaatatcgcgcgcatcgtgcgtgacatcggctaatgcctgcacttcgcgcagagaaaaatccgtttcgagggataaggtctggcgcgctgcctggctcatcaccagatgcgtttcgatatctgtgacatcgcgcagaacctgtaataagcgcacgccataaatcgcgccgctggcaccgctgatgcctacaatgagtcgtttcataaatagttgccctgtcagacttgcaggcagactttgcaggatttcggcgggagttgcaagtcagggtgccagaccggcaccctcagcgaaggcatcatccttcgttatgcatttcgagattttccacttcgttctgacgttgcactgctttggcgtcatcattacgtaacgtatcgaggaaatcgaggtagccctgatcaacatctttggtgacgtagacgccgttgaacacgctgcattcaaactgctggatatccggattttcagcgcgaacggcgtcgatcagatcgttcagatcctggaaaatcaacccgtcagcaccgatgatctggcgaatttcatcaacttcgcgaccgtgagcgatcagttccgtggcgctcggcatatcaataccataaacgttcgggaagcgaatttccggtgccgcagaagcgaggtacactttcttcgctccggcttcgcgtgccatctcgataatctgctcagaagtggtgccacggacgatggagtcgtcgaccagcaggacgtttttatcgcggaactcggcgcggttggcattcagtttacggcgcacggacttacgacgcagctgctggcccggcatgataaaggtgcggccaacatagcggtttttaacgaagccctggcggtacggtttgcccagaatacgagcaatttccagcgcgatatcacagctggtttctgggatcgggatcaccacgtcgatatccagatcttcccattcgcgggcaattttctcgcccagtttcgtgcccatattcacacgcgcgctgtaaacggaaattttgtcgataaagctgtccgggcgggcaaagtatacatactcaaacaggcacggattgctgaccggattgtcagcacattgacgggtaaacaactgcccttcttcagtgatgtaaatcgcttcgcccggcgcgacgtcacgcaggaaatcaaagcccagcgtatcgagcgctacgctttcggaagcgaccatatattctgtacggttctcgtcaatatcacgttttcccagtaccagcggacgaatcccgtttggatcgcggaaagcaaccataccgtggccgataatcatcgccacacaggcatacgcgccgcggattaagcggtttgtggcagcaatggcagcgaaaatattgtcggcttccagcgggtagtggcggaagttgtccagctcgctggcgaagatattaagcagaatttcgctgtcggaagtggtgttgatgtggcggcgtttttcttcaaacagttttttacgcaactcgtgagcgttggtcagattgccgttgtgggcaagcgtaatgccatacggggagttaacgtaaaacggctgcgcttcagaggcgctggagctgccagccgtggggtaacgcacatgaccaatgcccatattgccctgcaaacgctgcatatggcgagcttcaaatacatcgctcaccagcccgttcgctttacgcaaacggaagcagttattggcatctatggtgatgatgccggcggcatcctgaccgcgatgctgaagcaccgttaaggcatcataaatgctctggttaaccggcataacaccggcgataccgacaataccgcacatacgtctttttcctcgttaagccacatctcagagcacttacgctctgggcaagaaactactgctgctttgcagataatcaaaaaaacatctgatgataaaactgaattgcgggatcagctgacttttgctccagtcttcgcttttgctcaccccggtaaaggagtcgagaaagaagagaatggcagcaacaatcaacacaccgcgcaacgcaccgaaacagacgcccagcacccgatcggtgccactcaaccccgttttctccaccaactggcctatcacgaagttcacgatagcaccaacgatcagggtagcgataaacagtaccgcgatggcaatcccatttcgaaccagttcgtcttcaaagcccgtaaaccagacactcaggtaagtgtagtaatgactggcaacaaagaaagcacaaccccatgtcaccaggcttaacgcttcacgaacaaagccgcggatcaggctaaccagagaggaaaaagcaatcaccgcgattatggcgtaatcaatccagaccatatgtgtcccacgattttacgccctgtcatcctgttcggggcgcattctaacagaaaaagaaaacgtttgcgtagggatttccttcccgcgcatcaataaaaatggcgctgaaaaaatattcaacgccatcgactttttatgcctttgcggcatcgggcaatgcgtgtcggatgcggcgtaaacgccttatccgacctacggttctacccctgcgtaggcctgataagacgcgccagcgtcgcatcaggcaagaccgtattaattcggcgtatagcccattaccacgccacttaagccagaaagttgcttcaactcacccaggctacctttcagcttatctttgctggcatccggcccaaccagaatacgggtaattttaccctgcactggcgtggatgggctcgtataaacccgataaccggcaccgcgcagcttaccgacaatctcattcactttatcggcatttttcagcgcacccagttgcacaacataggctttacccgtcggtgcagctttttcttccacgaccggcttcggttctggcttcggcgcaggtggtgcttcaacctttggtttaggcggctccaccggtttcggcttcggtggggcgaccggtgcaggttccggttcaaactcggtgttattggctgcaatagtggccggatcgaggctcggtgctgcggcatcacctgcccgcacctcttccgctgcgccttccggcggctgcgtcggtaacgcctgggtggcggctggcatcatatcaggctcatcacgatcgcccgctttcggcaccagcgggatagccgcgaactcatcctgataatgttttttctgcccgtccagcagccctggaagtacaatcacccccagcgccaccagcacgatcgtgcccactaaccgattctgaaacttacttgccaccgcttctcctcgcgtcaatcacttccatgacatgtgcgaccgtgtggaaagaaccacacaccagcacggtgtcttccgctttagcgtccgccattgcggcatcccatgcctgcgcaacgctatcaaaacttttgccgttacccaaatgctcaagcagttgttctgccgtggcaccgcgcggcccttccagtggcgcacaataccagtcatcaaccacgcttttcaaccaggccagagttccggcaatatctttatcatgtagcataccgataaccgccagcacgcgcccgtttttcggtagcgctttcatacgcccggtgagatattccgccgcatgtggattatgcgcgacatcaaaaataacgcgtgggctctcgctcacaatctggaaacgtcccggcaaaattgcgctggcaatcccgtcgcgaatggcattttcactgacttccagcccgctggcacgcagtgccgccagcgctgttgcggcattcggttgcgggacaagcggcaacggcagattttccagcgtgccgtgagcatcgctaaacgcccagtcatgatcggtgacggaatagttccactcaacgccccgacgttgtaacagtgcacctttttcctgcgccacatcagcaatggtagaaggcatttccggctcaccgacaattgccggtttttcgctgcggaagatgcctgctttctcgcgaccaatactttcgcgatctggacccagccagtcggtatgatccagcgcaatactggttactaccgcgacatcggcgtcgacaatattggttgcgtccagacgaccgcccagccctacttccagaatcaccacgtcaagttgtgcctgcttgaacagccacaacgcgctcagcgtaccgtactcgaaataggtcagggaaatatcaccgcgtgcgctttcaatctccgcaaaagaggcggtgtgggcgctttccggcaattcctggccctgcacacgtacgcgctcggtataacgcaccagatgagggctactgtagacgcccactttgtaccctgccgccatcagaatgctctccagcgtacggcaggtggtgcctttgccattcgtacccgcaacggtaaacacaaatggcgctggtttcaggacgccaagacgcgccgcgaccaggctcacgcgctcaaggccgagatcgatagttttactgtgcaggttttccagataagaaagccagctagccagagggctcgcggcttgaggagtgcgtttgataatcatggtatccgctgattcgttacggtgagaatagcaaaagggcagagccagtggccctgcccttatcagttatcaggcctcaggttcctgatccggtaccgggggtaccactacgccttcacgcggcgcttcaggattcggcgctggcagattcatcaacttcgccagaatgctcgccagtttcaggcgcatttccggacgacggacgatcatgtcgatcgcgcctttctcgatcaggaattcactgcgctggaatccaggcggcagtttttcgcgaacggtctgttcgataacacgcggaccggcaaagccgattaacgctttcggttcagcgatgttgagatcgcccagcatggcgaaacttgcagaaacaccgcccatcgtcgggtcggtcagcacggagatgtacggcaagccgcgctcctgcatttttgccagtgccgcagaggttttcgccatctgcatcaggctcatcagtgcttcctgcatacgtgcgccaccagaggcggagaagcagatcagcgggcagttatcttccagcgcctgctcaacggcacgcacgaaacgtgcacccacaacagaccccatactaccgcccataaaggcgaactcgaatgccgcagcgacaaccggcattccatacagagtgcctttcatcaccaccagcgcatctttttcgccggtttctttctgcgcagatgccagacggtctttatacttcttggagtcacgaaacttcagcacatctttcggctcaagctcgctacccagctccacaaggcttccttcatctaacaggctatgcaggcgattacgcgctgtcatacgcatgtgatggtcacacttcggacagacctcaagattacgttccagctcagcgcggtataaaacctgaccgcagctatcacacttagtccacaccccttcaggaatgctcgccttgcgggtgggagtaatgttgcttttaattcgttcaatccagctcattagggacctttctgtctgaacctggttcgatgccagttttatctttggggacgcataatgccatttttgcccccaacagaccatgaatgttgcacattaaaacataacagcccgaaactttggataaaaaagtggtcgaaccgcggagttactttttattttgcggcgcgtgccgcagcgcgtttgtgacggattatttcgatgacgcccggcaaaatagaaaccacaataatcccgacgatcagcagcttaaggttatcctgaaccatcgggattgtaccgaagaaatagcctgcgtaggtaaaaagcagtacccacaacagtgcgccgatcacgttataagcggcgaaatgacggtagctcatgtggcccattcccgcaacaaacggggcgaacgttctgacgatcggcacaaaacgggcgagaataatcgttttgccgccatgtttctcataaaactgatgggttttgtcgagataactgcgacggaaaattttgctattgggattactgaacaacttttcaccgaacaaccgcccgatagtgtaattgaccgcgtcacccacaatcgcggcgatcagcatcagcaccaccatcatatggacgttgagatcgttggtttccagacttgccaacgctccggcaacaaacagcaaactatcacccggtaaaaacggcgttaccaccagaccggtttcacagaacaaaattaagaacaaaatggcataaacccagacgccgtactccgcgaccagctctgccagatgcacgtcaatgtgcaggataaaatcgatgaggaaataaatcaggtccatatttgcctatgccttgtactcgtcatctttcaggctgtaactacgttggctacagcctgaaatgttccgagcattattctcgttagtccgccagaaatagcgggcccattggcggttttggaagatcataccggtcagggtaatccaccgcgaccagatacagcccttccgcttttgccgttgctgccgccagcgttctgtcctttgccgccagcaactctgctatccagctctccggctggttgtgggcaccgacttccatcaggctgccgacaatattcctgaccatatgatgtacaaaagcattcgctttaatatctaccaccacataaggaccgtgacgcgtgacattaatatgcataacgttgcgccacggggttcgggactggcactgcaccgcacggaagctggtgaaatcattctcgcccagcaagcattgcgcagcccgatgcatccgttcagcgtccagcggttcgtaaaaatgggttacccctttactcagtaccgccgggcgcagccgatgattgtagatgatgtagcgataacggcgagccgtggcgctaaatcgggcatgaaaatcatcaggtacagttttaacccaacgcacagcgatgtcaccaggtaaattcgcatttacgcccaaggtccacgccgcgtctttgcgcagcgcggttgtttcgaaatgcacaacctgcccggtaccgtgtacccctgcgtcagtacgcccggcgcagaagacggtgatgggttcgttcgccacctgggagagcgccttttccagcttctcctgcacactgcggacttcgttctgccgttgccagccgtaatacttactgccgtcgtactcaatgcccagcgcaattttataaactggcggttgttgctggtcggacattagtacagatactcctgcaccagtttctcggcgatttttactgccatcagcgcgccgccaaagcgaacgttatcggccacgctccagaactggacttgctccggcataccgtagtcattacgcacgcagccaacagaaagatgcggcgtaccgctagcatcacctacctgagttgggaattcgttctcttcagagagcacaatatcttcgccttgaacaaacgcatcacgcgcttcttctgctgccagtggacgcagagcttcaaagttgaccatctgggcatgaccgtagaataccggtgcctggacgacgctagcgctaatcatcagcccttcgtcctgcaggattttgcgtacttcgtcaacgatacgacgttcttcacgcacgctaccttcgctatccggcagtaacggcagcatgttgaacgccagctgacgcccgaagaaatcttcttcgtcaatcggaatgccgttgagcaatttcgcactctgccccgctaacgcatcgaccgcttttttgccctgggcggaggcactaatcaggctggtaacgctgatacgacttaaaccgccctgatcgattaacggtttcagtgccgccagcagctggctggtcagactgtctggtacggcgatgacattccggttccggtaatctgtcagtacaaacgggtttacttccggcaccaccagcggtacgtcgggttcgagagcaaacaatccactgctgtcgatcaccaggcaaccactgttggtcgcttcttcaacccaggcagcggtagcttctttgcctgcgacaaaaaatgccagctgcgcctgcgtccagtcgaattcagcggcatcctgcacggtgattgtcttaccaccaaagcgcagttgttcgcctgcgctttcgttacgtgccagtgcataaatttccccaaccgggaactgacgttcagccagcgtttcaagcagggcttcgcccacagcgccagttgcgcccaggacggcaatgttccagccttcagacatggtggtttactccagaaatagcaaagctccctgccaatgttacagcagagagcatgaagaagagattaacgtgccggatgatgaacggcgttaaaacccagtttacacagcaaacttgccgcactggcgtcatcacaaattacatacagagaactccattcacggcgctcaagatagtttttgcgcagtttatcgaactcacccggtatcccggcgactttacgcagcggtgcgtcatcgcggcgcacatcatacaccaaatgcaccagccttttcagcgtcggttgatcgagcgggccatgcagcgtaatgcgaccaaactctggcgcaggcagtaatgtatccagcgcaacgtgctgttcatgcccaataaacttgctataagcttcaaacacttgcgtagtaccgcgtgctttaccttccagggtatagcctgcgatatggctcgtgccgatatccacttttttcagcagctcgacgttgagttccggttcgccttcccagacatccagcactacgcttaacttctggccttcattcaggcaggtcagcaacgcagtattatcgacgactgcgccacggcaggcgttaatcagaatcgctccgggcttcaggctacggatcagtttttcatccgccagatgtagcgttttgtacggaccatctttaaagagtggcgtatggaaagtcagaatatccgcgcgctggactaactcatccaggctgcggaaatcaccctcatccccacggtcggcgcgaggcggatcgcaaagtaaggttttaatccctaacgcttccagtcgcgcctgcaatcgacgtccaacgttaccaacgcccacgatccccaccgtacggtcgtacagactaaatccatcgcgttcggcaagcatcagcagggaggagaaaacatattccaccaccgcaatcgcattacagccaggtgcagcggaaaaaccaattcccgcctgcttcaaccatgcttcatcgacatggtcggtccccgcagtggcagtgccaacaaatttaatgggttttcctgccagcaaagattcattcactttcgtgacgctacgcaccatcagcgcatccgcgtctgccagttgagcgacggggattggacgcccgggaaccgcggtcacctcacccaaacggctaaataagtcgcgggcataaggcatattttcatcaacaaggattttcacgtttgtgttacctgtatgagacgagagttaaccggacaagtgtgccataatctcgcggccaggcatacttgcgaagatttcaggtataaggatacgtaatgatacaacctatttccggccctcctcctgggcaaccaccaggtcagggagataatctgccgtctggcacgggcaatcagcctttatccagtcagcaacgtactagcctggaaagcttaatgacgaaagtgaccagtctgacgcaacagcaaagagcagaactgtgggcgggtatcaggcacgatattggtctgagcggagatagtccgctgcttagccgtcacttccctgccgctgagcataatctggcgcaacgtctgctggccgcgcaaaaaagccattctgcccgccagcttttagcgcaattaggggagtatttacgtctggggaataatcgtcaggcggtcacggattatatccgtcataactttggtcagacgccgctgaatcagctcagtccggagcaattaaaaaccattctcaccctgttgcaggaagggaagatggttattccgcaaccacagcagcgcgaggcgaccgaccgtcctttattaccggcggagcacaatgcgctaaaacagctggtgaccaaacttgcggcggcaacgggggaacccagcaaacagatctggcaaagcatgctggaactttccggggtgaaagatggcgagttaattccagcgaaactgtttaaccatctggtgacctggctacaggcgcgtcagacgctaagccagcaaaatacgccgacgctggaaagtctacagatgacgctaaaacaacctttagatgccagtgaactggcggcgttaagcgcatatatccagcaaaaatatggtctttctgcgcaaagtagcctttcttctgcccaggccgaggatattcttaatcagctttatcaacggcgggttaaagggattgatccgcgtgttatgcaaccgctgcttaatccttttccaccgatgatggacacgttgcaaaatatggcaacgcgtcccgcgctgtggatactgttagtcgcgattatcctgatgctggtctggctggttcgttaaccccgacgaaaactcagtatcgtgacaataatacccagcaccgcagagatcgccccggcaagaaatacgctagagtaaccaaacgtggtcgccagcattcccgccagcggcccggagacgccgagggcgatatcctgaaacgcggcgtaaccgcccagtgcggtgccgcgaacttgactggggacgcgtttaaccacctccacgcccagcgcaggaaagataaggctacatccggctccggttaacgccgcgcccgctaatgcgacccatgcacctggggcttgccagagcagcaacaagcccaccgtttctacaagcagagagacaatcgccactttcacgccgccaaaacggtccggcatccagccaaacatgacgcgcatcacgacaaatgcgccgccaaacgcggtaagagtaaagcccgccatcgcccatcctttgctggcaaagtagaggctaacgaaagtcccgataacagcaaaaccaacgccttgtagtgccagacctaaccctggtttccagataagcccgacaacgctccacaggcttggacgttctcccgccagggccggtactttgcgcactgtgccgttacaggcccacgccagtacgggtaataccattgtggtgatcgccagtgcggcaaaaccgtaatggctatgaatcaacaggccaagcggagcaccaacagcgagggcaccgtaaatcgccattccgttccaactcatcactttgccagagtgttttggccctacgatgcctagtccccaggtcagagcgcctgtcagtaactggctttcaccaaagccaagaatcaaacgcccgacgaccaacagagcaaatttgaacggtgcggagacaggcaaaatcgccgccagcagcaacgcgccgccagccagaccacaagctaacattccctgaagcgcgctacgttttgcaccatattgatcggccagtcgcccggcgtaaccacgcgtcagcaccgtagccagaaactgaatcccgacggcaatgccgaccatggtattgccatagcccagttcatgatgaacaaacagcgggataaccggcaacggcaaccctacggtcatgtaggtgagaaaaaccgcaaaagcgatgcggaagaggctaaaattggcagaagatcgtgtttcggtttggcttacagcagtcatgcattactccagaatgcagcgcaaggcgaggagtatccccgtctcatctctctggtttcagggttacggtgcgttggcaggatttaacgcgtacgtcttttcagaaggaaatcgacaaagcgggaagtttgcctggaactggcggcgattgtcaatgatgtgaaaaagggaaccatcaggttcccttttgcgttagtgccggaggccgcattggcgcgtaacgtcggatgcgacgctggcgcgtctactccgacctactgcgaattaatctttcagcttgcgcattaccagcgtggcgttggtgccgccgaagccgaagctgttagacataacggtggtcagttcgcgatcggtcgtttcggtcacgatgttcagacccgcagcctgctcgtccagctcttcaatgttgatgctcggggcgataaagccgtgttccagcatcagcagagagtagatagcttcctgtacgccagcagcgcccagagagtgaccggtcatggctttggttgcagaaatcgccgggctcttatcgccgaacacttcacggatagctgccagctctttcacgtcgccaaccggagtgctagtaccgtgggagttcaggtaatcgattggggtatcaacgccatgcatcgccatcttcatgcagcgtactgcgccttcgccagacggagcaaccatgtctgcaccatcagaggttgcgccgtagccaacgatttcagcatagatgtgagcaccacgcgccagcgcgtgttccagctcttcaaccactaccataccgccgccgccagcgataacgaaaccgtcacggtgagcgtcgtaagtacgggaggctttttccggggtgtcgttgtatttagtagacagcgcacccattgcgtcgaattcgcaagccatttcccagcacagctcttcgccgccgccagcaaacacgatgtcctgtttgcccagttggatctgctctactgcgttaccgatacagtgtgcggaagtcgcacacgcggagctgatggagtagttaacgccatgaattttaaacggggtggcgaggcaggcagaaacgccggatgccatcgctttggtgaccacatacgggccaaccgctttcaggccgcgcgggccgcgcattgcgtcagcgccgaacacctggaaacgcggggagccgccgccggaacctgcaatcaggccaacgcgcgggttattctggtaagcttccggagagaggcccgcatcagcgattgcctgctccatagaaaggaatgcataaatggatgcgtcgctcataaagcgcacaactttgcggtcaatgaggccagtggtatccagttttacgttgccccagacgtggctacgcatgccggaatccttcagctcctgagagaaagtgatcccactacgtccttcacgcagagatgccaggacttcctgctggttattaccgatgctggaaacaatgcccaggccagtaatcactgcacgtttcattcaatacctctgtaagtcgcacatagagtaagtttcgaatgcacaatagcgtacacttgtacgccgaacaagtccgatcagccatttaatagagaaatttgcgcagccttacacacatcgctaagatcgagccaccgcctgtaagacgagtaacttacgtgaaacactactccatacaacctgccaacctcgaatttaatgctgagggtacacctgtttcccgagattttgacgatgtctatttttccaacgataacgggctggaagagacgcgttatgtttttctgggaggcaaccaattagaggtacgctttcctgagcatccacatcctctgtttgtggtagcagagagcggcttcggcaccggattaaacttcctgacgctatggcaggcatttgatcagtttcgcgaagcgcatccgcaagcgcaattacaacgcttacatttcattagttttgagaaatttcccctcacccgtgcggatttagccttagcgcatcaacactggccggaactggctccgtgggcagaacaacttcaggcgcagtggccaatgcccttgcccggttgccatcgtttattgctcgatgaaggccgcgtgacgctggatttatggtttggcgatattaacgaactgaccagccaactggacgatagcctaaatcaaaaagtagatgcctggtttctggacggctttgcgccagcgaaaaacccggatatgtggacgcaaaatctgtttaacgccatggcaaggttggcgcgtccgggcggcacgctggcgacatttacgtctgccggttttgtccgccgcggtttgcaggacgccggattcacgatgcaaaaacgtaagggctttgggcgcaaacgggaaatgctttgcggggtgatggaacagacattaccgctcccctgctccgcgccgtggtttaaccgcacgggcagcagcaaacgggaagcggcgattatcggcggtggtattgccagcgcgttgttgagcctggcgctattacggcgcggctggcaggtaacgctttattgcgcggatgaggcccccgcactgggtgcttccggcaatcgccagggggcgctgtatccgttattaagcaaacacgatgaggcgctaaaccgctttttctctaatgcgtttacttttgctcgtcggttttacgaccaattacccgttaaatttgatcatgactggtgcggcgtcacgcagttaggctgggatgagaaaagccagcataaaatcgcacagatgttgagtatggatttacccgcagaactggctgtagccgttgaggcaaatgcggttgaacaaattacgggcgttgcgacaaattgcagcggcattacttatccgcaaggtggttggctgtgcccagcagaactgacccgtaatgtgctggaactggcgcaacagcagggtttgcagatttattatcaatatcagttacagaatttatcccgtaaggatgactgttggttgttgaattttgcaggagatcagcaagcaacacacagcgtagtggtactggcgaacgggcatcaaatcagccgattcagccaaacgagcactctcccggtgtatagcgttgccgggcaggtcagccatattccgacaacgccggaattggcagagctgaagcaggtgctgtgctatgacggttatctcacgccacaaaatccggcgaatcaacatcattgtattggtgccagttatcatcgcggcagcgaagatacggcgtacagtgaggacgatcagcagcagaatcgccagcggttgattgattgtttcccgcaggcacagtgggcaaaagaggttgatgtcagtgataaagaggcgcgctgcggtgtgcgttgtgccacccgcgatcatctgccaatggtaggcaatgttcccgattatgaggcaacactcgtggaatatgcgagcttggcggagcagaaagatgaggcggtaagcgcgccggtttttgacgatctctttatgtttgcggctttaggttctcgcggtttgtgttctgccccgctgtgtgccgagattctggcggcgcagatgagcgacgaaccgattccgatggatgccagtacgctggcggcgttaaacccgaatcggttatgggtgcggaaattgttgaagggtaaagcggttaaggcggggtaatctgctctcgcagtgtttgccggatgcggcgtgaacgccttatccgacctacgtgtgacgtgtaggcctgataagacgcgataagcgtcgcatcaggcatgctgctccagacgccgcaacttactgctgactcgcctgctgaaacaggttttcccacatatcggtcaccagcgcctggtcacgcgggctcaattcaccagcaccaatggctttttccagactctggctaacggtcgtatgcaccgcctgagcggagtggtcatcaccactttccagttctgcgatggctaatgtcaggtggccacgcaaatacccactggcaaacaactcatcatcactggcatggtcaaccataccgtcgattaatgccagaatgcgactttcaaactccgcgatcatcttctttcctcattgtaaaacgtggcgctggcttcagttgagcgcttccggccacgggaactgttccgccgtaagttccggcgtgtgataataattttgtagtgctttaatgaagcgtgccggacgttccggaatgccatttgtcagataatccatcacctgcgcatgtactcgccgttgaaacaccacacgatccggttcgaaatccccttccagattgtcgcaactgacgttaaacggatatcccgccgccacacagaacaaccagtcgagcgcctgcggcttcacttcaacatcttcaaactggctttgcgtttgggcatcgcgtccgtccgggcaataccagtagccgaaatcaaccagctcacggcgcgctttcccggcaatacaccagtggctaatctcatgaattgcgctggcataaaagccatgagcaaagacgattcggttatacggtacttccgcatcagcaggaagatagatcggttcgtcgtcgcctttaatcagacgggtattaaaatcatcggcaaagcagctattaaaaatttcaatcaactgctcgtagtggtgtgtactgttcattagttcatccccaaccagtggaggatctcctgtccgtggctgtcgtaaagtaatttggcactcatcaccgcgctgacgataacaatcatcgggcggatcagcttttgtcctttgctcaacaccagtcgactacccatgcgcgcgccgaggaactgccccaccagcatgacaaagcccgtcgcccaaatcactttgccgccgagaataaacagcagtaaaccgccgatgttactcgttgcgttgagtaatttggcgtgagccgtggctttggcgaggttaaatccgcacagcgtaacgaaggccagcgcgtaaaagctcccggcagccgggccaaagaatccatcataaaaaccgacgcagccaccggctattaacgcgaagggtaaaccgtacatccggcgctggcggtcttcttcacctagctttggcatcagcaagaaatagaggccgatacaaattaccagaatgggcaaaatctgccgtaagacatcagcctgaacgtattgcaccagcagtgcgccgctcatactgccgacaaaggtcatggcgatattgagtttctgatcgcttaaactaaccactttgcggcgaataaagtagatagtagcggaaatagagccgccgcaggcttgcagtttattggttgccagcgcattagcgggagacatccccgctgccatcaatgccggaatggtgagtaacccaccgccaccggcaatgctgtcgataaatcccgccagcatggcgacaaaaaagagaactcccagcaacagcggggaaaccataaacaggctattaaacgtttccattagatcacgtgctcatccagtagcgcctggcaggaaggcggcaacggaggcggtgtcttcttctcaggctttgttgttcccggttttggaggttcaaaccagctttgcagttctgccccgcaaccatcgccacttggcggtaaaggttgatcttcacactccagactatcggcagggcaacgtaatcgtacatgcatatgcgcgcgatgctggaaccagggtcgcactttgcgcaaccagtcgcgatcggtgcccgcatcaaggcaaagttgttgtttaatcgccggattaacaaaaatgcgcgtgacgtctttgtcctgggcggcgagtttgatcaagctgaaaatttctggcttccacagcgtggagacaacgtgtttaccgtcgcgggaaactaagtccagtgcttgcgggcgcaagagctgcgcggaggtccagcgagttttcggcagttgcagaaagatatcgacatccagtccggtctggtggctggcatgaccgccgttgaaacgcccaccagcgggcatccccatatcgccaatcagcaccgtacccatgcccagattgctcacctggctactcagacgctggataaacatcaccagatccgggtgaccgaaatagcgacgctgatcggtacgcatgacctgataatgttcggactgtatcggcagcgtgtcagcgccgacaatacagccattagaaaaactgcctatgctttgtgcgctacccggcacaggttgggttattttttgccacggcgtcgctgccaggctggcgctactggcaagcagagccagcagcgcaatcgcggttttattcattttttaccagcgtggaatatcagtcttcacatcggcattttgcgcccgttgccgtaacaggtgatccattaaaacgatcgccagcatcgcttctgcgatcggcactgcgcggatcccgacacagggatcgtgacggcctttggtgatcatctcaacttcttcgccaaagcggttaatggtacgacccggcacggtaatgctggaggtcggtttcagcgccatatgggcaatgatttgctgcccgctgctgataccgccgagaatgccgcccgcatggttgctctggaaaccgtctttggtgatttcatcgcggttctggctgccgcgcagcgccaccacgtcaaagccgtcgccaatttccacgcctttcaccgcgttgatgctcatcagcgcatgggcgatgtcagcatccaggcggtcaaagaccggctcgccaagtccggcaggaacgccactggcaacaacggtgactttagcgccgatggagtcgccctcttttttcagcgcacgcatcaactcgtctaacgcgtcgattttgtcggggtccgggcaaaaaaacggattttgctcgacctggctccagtctttgatatccagcggaatgtcgcccatctgggtcaggcagccacggatttcaataccaaatttctcggcgagatattttttggcaatagctcctgccgccacgcgcatggcggtttcgcgggcggaagaacgtccaccgccgcgataatcgcgcagaccgtatttttgttcgtaggtgtaatcggcatggcctggacggaaaacgtccttaatcgcactgtaatcctgagagcgctggtcagtgttttcgatcaacaagccaatgctggtgccggtagtaacgccttcaaaaacaccggagagaattttgacctgatccggctcgcggcgctgggtggtatagcggcttgtcccagggcgacgacggtcgaggtcatgttgcaggtccgcttccgtcagcggaatgcctggcggaacaccatcgacgatgcagccgagcgccagcccgtggctttcgccgaaggtggttacgcgaaagagttgtccaattgtgtttccagccatcacggctccgttattgttgtgtttgcgtgtttacttaatctttataaatcgcgaaatgttctcgtgcggcaataagctgctctttggtgagcataaacacaccatcgccgccgttatcaaactccagccaggtgaacggaacatccggatattgttccataagatgtaccatgctgttgccgacttcacaaatcaacacgccatcatcagcaaggtaatctgccgcgttaccgagaatgcgacgcgtcagtttcaggccgtcagtgccagatgccaggcccagttccggctcgtggcggtattcgtttggcaggtcggacatatcttccgcatcgacatacggcgggttagtgacaatcaggtcgtactgcactttcggcaagtcgcggaacagatcggaacgaatcggaatgacgttgtggatcagaccgtgttcttcgatgttctgttcagcaaccgccagcgcgtctggagagatatccaccgcgtcgacttctgcatccgggaaggcataagcacaggcaatggcgatgcagccgctaccagtacacatatctaaaatatgctgcggttgcttgctgataagtccggcaaatttattgttgatcagttcaccaatcgggctgcgcggcaccagcacgcgttcatcgacgtaaaattcatggccgcagaaccacgctttgttggtcaggtaagccaccggaatgcgttcattgacgcggcggatcacgcgttcaacaatacggtgtttttcgctggaggtcagacgcgcggtgcgcatatcttccggaatatccagcggcaggtagaggctaggcaacaccagctgtacggcttcatcccacgggttatcggtaccgtgaccgtaccagatatttgccgcgctgaagcggctcacgctccagcgcaacatgtcctgaatggtttgcagctcatttactgcttcatcaacgaaaattttatccacgtattcctccagggcatgatcgcaataatttcggcggctagtttgccatgaagatgacgataaatcagcattcacgcgcggtgagtgaggaaaaatacgtttaaaacgatcgattgcgctacgagtcgggtaaactgtaggaaaattagaaatagagacagataaatgaaaaagaaaacaacacttagcgaggaggaccaggctctgtttcgccagttgatggcggggactcgcaagattaagcaggacacgattgtccaccgaccgcagcgtaaaaaaatcagcgaagtgccggtgaaacgcttgatccaggagcaggctgatgccagccattatttctccgatgagtttcagccgttattaaataccgaaggtccggtgaaatatgttcgcccggatgtcagccattttgaggcgaagaaactgcgccgtggcgattatagcccggagttgtttttggatttacacggtctgacgcagctgcaggccaagcaggaactgggggcgttgattgccgcctgccgccgtgaacatgtgttttgcgcctgcgtgatgcatgggcacgggaagcatattttgaagcaacaaacaccgctgtggctggcacaacatccgcatgtgatggcctttcatcaggcaccaaaagagtatggcggtgatgcggcgttgttggtgttgattgaagtcgaagagtggctgccgccggagttgccctgaggagttgagcgcgttgcgccaggtacgggtaatggcaggggcgaatgcccctgcctggtgtatctaagggttacaactcattcagtatgtactggaaccggcaagtagaatcgattggctgcatactgctggtatcaacacgcacgaccatatcgtgtaactgtttgtccgttatagggtgtcgatttggcgtgacgctgacttccgccttgtcacatccgctcgcggtaaaagttatcatctgtgcaacccagcggcagtaaccacctgtttcattcatctgcgtactgtcgcacaacttcccatctttcatcaaatacgtactaagcgttttctcaaccacaccgcccgtgctctgcagggtgagcagtttactcttactgacataattctcattccaactaacgtcataaggttgaacagaaacggatggacaaatcgtgtcgtgactatcaggcccctgatacgtcacgccccctggagaggcttcagagtcattcataataaccaaccatggacaagaaaagtaagattcaatctctgcagagacaataacctcaaatgtataatacccgcagttccacccagacggtaatccaggacaacttgctttgttgatattttgatggtagccaatcagcttaacgctaggggcaggaggaggaccactccagctcacattttgcaatatttccccagtcatgagccattgactacttttatattcaccaacgtacactgcggatggcatcattatttttaaattaaaagtcgcaatattacggctatcaccgttgtaaccgtagtaaacgtcaacgctatgcccggcagccatagcttctgtagtagcaataagcatgaccagagcgaacaaccatcgtagtattttcattttaaatatactcaaatgtcgcagttaaagaggcggtaaattcaccgatcgtcacatcacggccgcttttcgcctgtagccaggctctgaaattgatatcgttattgccattggttagcgcaaaggtcgccccatttgtattgttgatggcaacctgcattccgtcggttttttccatgccaattcccactccctgagcggtactactcgtatccagtgccagaaaaccgggttgttcgctgtcttctacccccgtgagcgtgacttttacgttgtatcccgccggccctttgcaatctttcagcttaaagactacgggtacacgagcggactggcctgcaacgttcaaatcctgacgactgaccgtgggaaagcgcacctctgccagatattggccatccaccaccagcgcacaggatttacttaataaattaccggagaaatgcagattattatctgccgcgaataacgtgctactcattgccaatatcagccccgctaacaggacgtaaccaccggactgaatcatacttttattcattgataatccacccgtaatgttgcgtaagcgctaaaattcgtatcgcttaacacagcatcactcgcttttaccggtacggcctccagcttcggcttttgcgtaaaatcagtggcgttgatagcaagcggagtattgagtttaaaacgctgaccatcgtgctgaagctcgataccaaaaccgggtacatcagtttcaattgctgcatcattaaaactggtttgtgtaccagtccaggtgagggtcatctcccaatctggatgacgggtcgtgctgtcacaagtgagttcatatggcacctctttacgaccatagttgccgttgatgtcgtcgataatgagatcgcgaaattcgacttcaatggttttaccaccgctgatgctacaggttggcggactcaataatgtcccgtgaaaggtgatgtcttcatcagcagcatgagctatggcgctactgacacaaagcagggttaagaaagtctttctcattgatagtccaccaccatggtcaaactggcgttaaactcgcccgcagcaagttgcgccccgcttgccttcacaggtacagccttcaactgtggctggttattgatattaaatggcgtccagctattttcaccgacggcaaacaaactgttatcggcgctattttctatccgaatgcccagcccggtgatattggtactgagtaccgtttcgccgttaatcgtactggtattgcccttaagttgcatccgcaagtcgttagcaagactgtttgtgcagttcaacgtgtatttcgcatcttgccgataattggtgccatcaacgttatcagcaatcatattgccgaactctacctggctgcccttgatactacagggtggcggagcatcgaccaacacgcgcagaattaaatccacgggtttactaccagccatagcagataaactacagacactgcataccagcagccctgcgcccactacaaacttttgactcataactccccccgtcatcagcctttgcggctctgctcttcatccacctggcagctgttgccattgcactggaagaacagcggcatccgtgcgccaaagtcgttgacgtaagtcagcaccggtacgctatccattttcacattcagcggtaccgtggttttcggctcaatgaccagagggctgaaccctgcagctggattaccgtttttctgcgcactggcgttgctgataatcacgtagtacggcgttgggttattgacggtaaatgcctgaccgctgcgggtgagcgtcaccttgtgctgccacggacttttcatactgaccttttccagcgcctttggtcgccagaacaacttgatacgcgtttgcagcgcgatttgcagggtattgggtttgttactttttggcgggatctcgcgcacgttaaagtagaacatgctttcacgatcggctggcaatttgttgatatccggcattccctgcacttttacctgcccgttcatcatactatcgatgcgttgcactggcggcagcacagttaacgggctggtgatcttgttacccttttcatcttcaatccagctttgagccagataagggagtttcggatcgttattacgcagcgtcacgctgatacttttgtcgctttcattaaatatcaaacgggtacgatctggcgttacagacgccagggcagacaaactggtagcgctaagcagtaacgccagcgtcatagcacccaatttggcagagcaaagtaaatcagacatggatcattccttaatcacgttattggttagcactaacagaaacagggggatcggtgggtgtcacctgttgcgtctgctcctgaatgacaggctttatgtcatcaggaacaaccggcgcgacgttgcctttatgctggcatggcagtaacaagccgttaaacagatcggcaggcagcgggtccggcaggttgatatcgcaatgcgcaacaccactccagaacacactcatatgttcgccaggtttcaccccagccagatagacactaccgtcatcatcgacaaggcccactgtctgctcgttatcattttttacttctgcgccaaacggtggatggctgccatcttgtaaacgcagcaccgccatcgctttttgaccactgatgacggcaaatttgcggtagccaatggctccttcagttagcgtggcttgcaccacgctctgggttgcttcggcgttttccggcaatttgttgaggtcgatatacgcctgattgcgataataattgttaacgtcagaaacgacggctttaccaaacatattggtataaacagcagccccgttaccttccaccggaacatcggcaacgccatcggcatcaatcagcaggcgtgtcccgcccatattctgggtacggtgaagtgcgccgccgtgggtagtaagcgttgcgccgccctgtaagctcaagcccgcagaggtgtattgcccttcatggtagttcgcactgaggtcaacctgcgccaggctaccatcatggctgtagtagccatcaacgctggtgtgtttgtcactggtgccgatgttcaactgatagtgagtcgcgtcatcgacacggctaaaataaccgacctggctgctgtccgtcccactgccatagttgccgttatagctaacggtactgttgtcgccccacggcatactgagcgaaatttacatgcccttatccgcccggttgtcatactcgtagcggtagccagtcagggaaacgctcatattacgaatgctgcccatattgaaatagtgggagagcatgatgttgtagtttgtctgctcctcacgatcccagtaggtatggcgggtatagttgagataaacgctaacacccgcatcgcggaagttctggttataagtggcggtgtacatctctttgtcgttgcccgtacggaccatttcgctgtcactggcatccagatactcgctcatggtcataaagttctcttcgctgaagcgatatccagcgaaagtgacgcggctgttgagctggtcaaagtctttggaataactcacacggaaggagttaccgtccaggctacctttgccataagcggtgtctttatccagtttggtatggctatgagtaacatcaaacgcgaccgcgccgaaggtagacaaatcgcgaccgacgcccagcgccgcagactgatagttttcatcacccagcgcaccgccatataagctccagccgttagcgatgccccaggaggcttcagcaccagagaaaaatcccccctcgacatggtggccccactcttgcggacgtcccatcatgatcttatagcgaacctggcctgggcgagtgaggtatggcatgctggcggtgctgatgtcatattcctgcacctggccgttctgttcttcaatgcgaatatgcaacgtaccggagacggaatcaccaagatcctgaatacgaaacggtccagccggaacctgcgtttcgtaaatcacacgccccatctggctgacggtcacttttgctgtggtgtgtgccacgccggaaatgtctggcgcgtagccgcgcagattgggaggcaacatttgatcgtcagtgctgacactgccaccaacataattaaaaccgtcgaaaatatcggaattgaggtaatcttcgcccagcgccagtttggcttttaaactcggtaacgcccgccaggcataatagcgactccactcccattttttttgtgtgtcatcgccgccaaattcatcgtcatcatcattactgcgcgtatgttgatagttggtctgccagtcagcgcgcatacgccatggccccaggttaaccccgaccgtcccgttgccgctgatctcgttactgtcatcgccgccattttcttcgtgtcgtgtttgcgcagtgatgctgtagtccgcaatgatcccggagatgccatcatcccaacgagaaggtggatcccagtcgggccaggtatattcgaggtaagcctgcggtagactaatgactaatgcggactggcttaaatcagccttaatttccacgccttccagttgaccgggcttcaggcatttaccatcgtggctccattgcagatttttcgccacgtcttcttttaaaccaaactgcgccaccagttccggtgtcagacaagcatagcttttgctaacgtcatcttcaccagcataccagtaaatatcgtactcttccgccaatggctgtttatttagttgaacctgtaaattgtattttccgggctcaacatacccctggctggaaaaacgcttcagatcaatttttgtgtcgccttttaattccagaaaacgggaatcaaactgaatgtcgtcttcagcccagacactgctataactcccactcattgccagcgcaatgcaccacggaagaatccgtaatcgaaaaagagaatggtcaggcatacacgtttttatccgtttttattcttgttcggtcaaaatccatttaaataccccatagcagtgtcgctatgggggtatgccttacaggtaagtaatctggaaggtggtatttgcttcgaaattacccagatctggcgcatcagctgcgccgaccagccaggctttaaagttcagagtctgcttcgctttgcctttattagtggcagtatctttcacgattttctggtcaatacccatgccgcttttgtaagaggtacccagagagtcaccgatcgccaggctaacattgttaaatgccgcaccggtatcggtattgaaaatggtgtaataattgccgctatttgcagaagaaacggtaccagtaaaggtagtggtcattgtttcctgagtatcaaatacgcaatcttgcaggcgaatctggaaatttttcggcgtggtggtgccgttatttttcagtttttcggcaccgatatcacccatatcaacttccagtttgtgatcgtccggaacgatagaacacacactgtcttcaatggtgccgtaaaaacgtgcagtaccgttgttacccgcagcgattgttgccgtagaggtgaacgcgcccatcaccattgccgcagcaatagctgttttaacaaacttactcattatttgtccttaaactataaataattaaaatataaacattgcaatacattgattcagtcaatagccaatgtttatacccagccattgaatacggcatgcgatccaaaaaaacaggtcgtaaaaaatgtattcgttggtgtggggtcgaatagtgatgttttcactcccctgattcaatttaattttactaatgagtaaatgtagatttaattaatatattgataggggaaagattatcttaaggatcttctaaaaaaacacgaaatatatatttagaaaaaacaggaagcatatcaacaatgaatgccaatagcttaaaaaacaaacaatgaacatataatgcgattggcattaacccgcttttgtcgatataatatataaacactatagccagaatttaatcaagtttcaattacgtcctgcctgattattcaactctattttctccattatctgtattaataaatgataatgagtgtcaaacagacattattcatttcaacatgtaactttgggcaaaatcaagatacgcgcagaagaatactttccgaatgaaagttaaaggtgttttatttatagatggggagagtcttcgatagtagtgaggttgacagatatccgctgcctgatgagcaattatgcccaatgaatctacctcattgggcataatttggaactcatcagatagcttttgccatcttcagattacacgggctcatctgccagttgaatgtgccgtttccgctttcatcaagcgttacgctggcaatggcgctggtggtaaacataggcggcgtttcgcccggacataactcggcaaccagatacccgactaacggtaagtgagagatcaccagtacgctagcaacaccttcattggtcaacgcctgcaaataggcactgaccagaccaacatcgccgcagggcgttaactccggcagaacttctgcactggaaggcaggttcagacaatcccctacttcttccagtgtttgctcggctcgcaggaacgggctcaccagaacgcgttcgatttccactttttgacctttcagccagttcgccatcaggcgagattcgtcacaaccattagtggtcagaggacgaacggaatcactggcggcatcgagggctgcgtcgccgtgacgcatgataaaaacttgcatattgcaccgcttttgttaaccagattcgcccgttttctttcatctgaaaccagagaaagaaaacggtggccggcattgtgccttatccattcaccgaatgaaacgctgttttttacctcaatggcgtaagtatagtcaatatgcgtttacattttgaccaacactccgccattcagcgcggattcatatagctttgaccttcttattgcaggtcagttgcagttgttttccaaaaactttccccacgcgcgcccatctcgaccaaacgctcgcaaggggtaaaacgggaaccatactgcgtggcaagtcgttgcattattgcaaccacttcgcccgcgccgagagaatcgatatagcggaacggtccaccgagaaatggcggaaaaccaatgccaaataccgcgccaatatccccgtcacgcacgctacggataacctgctcatcaacacaacgtactgcttcattcagcatcaacatcacacaccgttcagcaacctgcggtgcggagattcgcccctgcccttgtgtgccaatcagcgggtaaatggcgggatcgacctgttttttgcttttacgccctttctgaccataaagatagaaaccccggccattttttctgcctttgcgatcgtcgttcaaaatactagaaacaacatttgcaggcgcgctaaaacgttctccataagcggcttccagtacaggaataattttagtcccggtgtcgattcctacctcatccaaaagttggattgggcctaccggaaaaccaaatttcactagcgcggcatcaatgtgctctacccgttcaccttgggtcaacatgcggatagcttcattaatgtaaggcgctaagatgcgattgacgtaaaaaccggctttgtcacgcacgacaattggcgttttaccctgttttttcgccagttttactgtggtagcgatggtttgcgcgcttgtccccgcatgaggaataatctccaccagcggcattttttccaccggactgaagaaatgcaggccgataacttgctcaggtcgcgtggcgtgagcggcgatatcaccaatcggtaaagaactcgtattgctagcaaagatggtatgagcggcgcaattttgctcaacttccgccaccatctgttgtttcaattcgagattttcaaacaccgcttcaataatcagatcgcgatgggcaaagccgcgatagtccgtcgttccggagattaatgccagctgtttgtcacgttcgctggctttgagatgacgacggcgaactttgccctccagctgatcccaactgtacttcagcgcatgatttatgccctgcgggttgatatctttaattctgaccggaatccccgctttacaagcagtgacataagcaataccgccgcccatcaagccaccacctaaaatccccacgctgtttaatggcgcaggcggcgcatcactgccgggatctttcttcacgtccgtactggcaaaaaagatactacgcagcgcctggctttgtggcgtcatcgccagttcgccaaacgcccgagcttcggcgtcataaccgctgctggtgccctgcgctaatcccgtttcaacaacctccaggatgcgttctgtcgccggataattgccttgagttttgtgttctgttttcttgccgaccattttgaacagcagcgcacgacctaacggccccgccagaatacgctcgcgtacaggtagagggcgggaagatgggcgctccttctttgccagctcaacagcggcttccagcagaatggagtgcggaacaacgtcatccaccagccccagctttaatgcctgtttcgcccgaagttgttttccggtgaggatcatctctaatgctgtgctgacgcctatcagacgcggtaaacgctgggtgccgccactaccgggtaacaatccaagttgtacttcaggcaaaccgagcaccgttttaggatcgtcagtacaaacgcgaccgtggcacgccagcgccaactccagcccaccacccaggcaagcgccatgaatagccgcgataacctgaatgggcaaagcatgaatctccgccatcaactgttggccctgccgcgccagagcttccgcttcttgcgccgttttgcagttgccgatcatgttgatgtctgcgccagcaatgaagttgtccggtttagcggagacaaacaccacgcctcgcaactctttgttttcacggagttgcttaataatggcgcgcacctggctggcaaactccgccttcagggtattcattttctcacccggtacgtcgatggtgataacggcaatgttgtccagacgaacattaagggtaaacgcacttgtcatttccattattccgcctccagaaccattgccgcgccaagcccaccggcagcacaggcggtaactaaaccaaatccaccgccgcgacggcgaagttcatgcaatgtctgggtaatcatccgcgcgccggtcgccgcgaagggatgcccgtaagcaatgctaccgccaagcacgttaaatttgctatcgtccacttcgccagtggcatgtgcacgccccagtgcttcacgagcaaaacgttcactacccagcaactgaatattcgccagcgtctgagctgcaaaggcttcgtgcatatcgatcaatgtcagatcgctcatcgtcaaaccggcacgctccagcgccagcggtgtactccaggctggaccgagcaacatgtcctgccagacatcaatcgcagtaaatgcgtagctgcgcagataccccagcggcaccagccctaattctttcgcccgggattcagtcatcaggatcaccgctgccgcgccatcggtcagcggcgtactgtttgccgccgttaccgttccgtgtttgcgatcaaacgccgggcgcagctttgcgtaatcggcaaggctggaattaccgcgaatattgttgtcttcgacaagcggttgtttataaggagggataaaggcagtcatcacctcttctttgagttttccgtcactccatgcctgagcggcacgctgatggctacggtgcgctaatgcatcttgctgttctcgggtgatgccgtaggttttcgccatttgctctgcggtgtcgcccatccgcaagccggtagaatattctgctaccgcaggtggtacgggcattaagtcgcgcaaacgcaggcgagagaagagtttcagtcgctggctcatggtacgagctttgttgacatcaaccagcacgcgcgccagttttttactgacgccaattggcaatacgctagaggaatctgccccaccggcaatccccgctcgaatagttcccgccatcaggctttctgcgacgtttgcaactgcctggaaactggtagcgcaagcgcggctgacgctgtaagcatcggtatgtacattcattcccgtaccgagaacaatttcacgcgcaatgttgggggcttcaggcatttgtacgacctgaccaaagaccagttgttcaatcacttcggcggggatctcgctgcgtgccagcagttcgcctaccaccatcttccctaaatcaaccgcgggaatgccatgaaaagccgtcgcctgacgggcaaaaggcgtacgtaaaccgctaacaatggcgatacgatcgccctggcgggtaaccagcggtaaaacctgacccataacactcccctgtaaaaaaataaataaagtggtctgacctgatcatagtcttaaccatttttttacatttagccaagtggagaaaagggaaagtgggagctatgacacagagagaaaagaagaagagaaaagaaaacgcccctgccagcaactgacaggggcgtacgtacccgagaggaattaacgcagacccagctggaaaatcagcatttcagcttcgcaggcaaaagtgaaatcgatatccaggcgcacaccgtcagactcttcagtgaaagtcggggtgattttgcaaggttcagattccacgctacgggctttttcagtcagcgccgccagcgtttgctctgcttctgcgcggtttgcaaacacgcggctgtaagacgcggtgcagtcggagttgtccataatggtgccaacatccatacagcagcaaaccggggtttcatcagcactacatttactcatcgttgatttcctctgtatgtgcacccaaggtgccagataaacgttgtggatattttacgcttccggaaagtgctgctccagttgttaattctgcaaaatcggataagtgaccgaaatcacacttaaaaatgatctaaaacaaaattcacccgaatccatgagtgcgccacctccaaattttgccagctggatcgcgtttcttagatcatatttgaaaaaagatagaaacatacttgcaacattccagctggtccgacctatactctcgccactggtctgatttctaagatgtacctcagaccctacacttcgcgctcctgttacagcacgtaacatagtttgtataaaaataaatcattgaggttatggtcatgagccagaaaaccctgtttacaaagtctgctctcgcagtcgcagtggcacttatctccacccaggcctggagcgcaggctttcagttaaacgaattttcttcctctggcctgggccgggcttatagtggggaaggcgcaattgccgatgatgcaggtaacgtcagccgtaaccccgcattgattactatgtttgaccgcccgacattttctgcgggtgcggtttatattgacccggatgtaaatatcagcggaacgtctccatctggtcgtagcctgaaagccgataacatcgcgcctacggcatgggttccgaacatgcactttgttgcaccgattaacgaccaatttggttggggcgcttctattacctctaactatggtctggctacagagtttaacgatacttatgcaggcggctctgtcgggggtacaaccgaccttgaaaccatgaacctgaacttaagcggtgcgtatcgcttaaataatgcatggagctttggtcttggtttcaacgccgtctacgctcgcgcgaaaattgaacgtttcgcaggcgatctggggcagttggttgctggccaaattatgcaatctcctgctggccaaactcagcaagggcaagcattggcagctaccgccaacggtattgacagtaataccaaaatcgctcatctgaacggtaaccagtggggctttggctggaacgccggaatcctgtatgaactggataaaaataaccgctatgcactgacctaccgttctgaagtgaaaattgacttcaaaggtaactacagcagcgatcttaatcgtgcgtttaataactacggtttgccaattcctaccgcgacaggtggcgcaacgcaaagcggttatctgacgctgaacctgcctgaaatgtgggaagtgagtggttataaccgtgttgatccacagtgggcgattcactatagcctggcttacaccagctggagtcagttccagcagctgaaagcgaccagtaccagtggcgacacgctgttccagaaacatgaaggctttaaagatgcttaccgcatcgcgttgggtaccacttattactacgatgataactggaccttccgtaccggtatcgcctttgatgacagcccagttcctgcacagaatcgttctatctccattccggaccaggaccgtttctggctgagtgcaggtacgacttacgcatttaataaagatgctagtgtcgacgttggtgtttcttatatgcacggtcagagcgtgaaaattaacgaaggcccataccagttcgagtctgaaggtaaagcctggctgttcggtactaactttaactacgcgttctgataacgcgttcgcctggataaagtcacctgcatagcaggtgactttaactcccccacttcaccgaaagtagtgtcctcattgcttacctcctgagttttgcaaacagcctgttggcagcttgccctttcaaatcaataagcggtatccacagacaaacctgaagggaaaggcatattttcaggcgttctgctcgtccttctcaaagagtttacttttctgcatttccaggatactccccccccctggctattgtgcgctcatacactcaaattaaagataggttctaaataaatgagcgttttttgatagtctatttcattaggtaatatatatttgtaacaaatcaatcaaaatggaataaaatcatgctaccatctattagtatcaacaataccagcgcagcttacccagaatccatcaatgaaaataacaatgatgaagttaatggattagtacaagagttcaaaaacctttttaatggtaaggaaggaataagcacctgtattaaacatctacttgagcttataaaaaacgccatacgagtaaacgacgatccttatagatttaatattaataattccagtgttacttatattgatattgactccaatgatacagaccatattactattggtatcgacaaccaagaaccaatagaattacctgcgaactataaagacaaagaactcgtccgtactatcattaatgacaacatagttgagaagactcatgatatcaataacaaggaaatgatcttcagcgcattaaaagaaatatatgatggagatcctggttttatcttcgataagataagtcacaaactcagacatacggtaacggaatttgatgagagcgggaaaagcgaaccaacggacttatttacctggtacggtaaagataaaaaaggcgactctctcgctattgtaattaaaaataaaaacggaaatgattacttatctctcggttactacgatcaggacgactaccacattcaaagaggaattcgtattaatggtgatagtctcacccaatattgtagtgaaaacgccaggagtgctagtgcgtggtttgaaagcagtaaagctatcatggcagaaagttttgcaactggttccgatcatcaggttgtaaacgagctcaacggggaaagactgagagaaccaaacgacgtttttaaacgttatggtcgagcaataagatatgattttcaagtggacgatgcaaaatataaatgcgaccatctaaaagaaatagtttctactttagtcggtaacaaaattaacgttggccattctcaaaaaatatataagcattttaaggatctcgaaggtaaaattgaagaaaggcttcaaaatcgccaggctgaatatcaaaatgaaattaatcaaccatctgcgccaggtgttaattttgatgatatttaaaattatttttccagttttttgatttttcaacagctgaatatcggaaatagtcagtgacgaacatcagtatttttacataattacgtctaggtcattgtcggtttatctccttttacttgtggtaattgagggataacaacaaaaaaggtgagttttgcgactcaccttttttatttgtttcttattcagaatcaatatcttttaaatcatcctgaatcgcttgtgcgttcggattttcctgcggtttgagttcgccgccattagcgatgaaatcatgacgctggaagtacgcttcgcgcaccataatataaggatcggagctctgacgcagcagaccatcggaatccagcagctgagcgcgggtttcgatcccttcaagcgtccatttacccacagacatcggccaggtcagccaggaaagaaccgggtaaaaaccatccgccatatcaccaccgtcatcacgcagcgtgaagctaccgtagaacggtaactgaacgtaaggcccataacccacgccataatgaccaagcgtactaccgaagcggtgaggttcagtccgttgcagtttcgggttcgccatccctgcaacatcaataaaaccgcccatccccaaaatggtgttcaggaaaaagcgggtaaagtggaccatcccctgataagggtcgccctgcaagaagtagttaaccatcaccgcaggttcttcaaggttgccagtaaagttgctcaaaccgttacgcgccggttgcggaacataatcacgccaggcgacagcgaccggtcgaacaatatacgggtctaatacattgaagttgaagttgtacatggtgcggttgaacccttctaacgggtcagaacgcccttgctgatctgtaccggaactcgcacaccccaccagaagcgtagttcccagagcaagcgcgctcaggcgaagcttcataaatgtctccctgtttttttatggcttatgcagtttgccatccatgacggaacgataccgtatccgcctgtttaggtgtgggcgattgtaacagcacgtcaactgatgtccagacgccctgatttgctgatttgatcatagcctggtaatcgccgccctgtaggctacttgattctatagaaacagaaaaaggcaaacgcagccttttctacattttcagagtaactcccgtcagttgcgagcaaaaaagccgctacgctttagctatacgtgctaattcaagagaagagaccatggacaacgacaaaattgatcaacacagcgacgaaattgaagttgagagcgaagaaaaagagcgcggcaaaaaaatagaaatagatgaagaccgactcccctcccgggcgatggcaattcatgagcatatccgccaggatggtgaaaaagagctggaacgcgacgcaatggcgctactgtggagtgccattgcggcgggtctgagcatgggcgctagcttactggcaaaagggatatttcaagtcgaactggaaggtgtgccgggcagcttcttgctggagaatctcggttatacctttggttttattatcgtcattatggcccgccagcaattatttaccgaaaataccgtgactgcggtactacccgtcatgcaaaaaccgacaatgagcaacgtcggcttacttatacggttatggggcgtcgtgctgctgggtaatattctcgggacaggtattgcggcgtgggcatttgaatatatgcctatcttcaatgaagaaactcgcgatgcatttgtcaaaatcggcatggatgtgatgaagaacacccccagcgagatgtttgccaacgcgatcatttccggctggctgatcgccactatggtttggatgtttcctgcagcgggtgcggcaaagattgtggtgattatattgatgacctggcttattgccctgggtgacaccacccatatcgtggtcggttctgttgaaatcctctatctggtgtttaacggtacgctgcactggagcgatttcatctggcccttcgcactacctactttagcggggaacatctgcggcggcacctttatcttcgcgttaatgagtcatgcacagattcgtaacgacatgagcaataagcgtaaagcagaagcacgccaaaaagcagaacgtgcggaaaacattaagaaaaattataaaaacccggcataaatggcgagggtttaagcaatcgagcggcagcgtacttaccccgcactccattagcgggtatactcatgccgcattgtcctcttagttaaatggatataacgagcccctcctaagggctaattgcaggttcgattcctgcaggggacaccatttatcagttcgctcccatccgtaccagtccgcaaaatcccctgaatatcaagcattccgtagatttacagttcgtcatggttcgcttcagatcgttgacagccgcactccatgacgggtaaaaagtggataaaataattttacccaccggatttttaccctagagccatacagcctcacactcgatgaggcctgtcagtttcttaaaatatcctgatctaccatcgccgtcatagagcgtatttttattacctgatttgcaggttcgattccctattcggagatagcactcatgcaacacgaactacagcctgatagtctggttgatttgaaattcatcatggctgatactggctttggtaaaaccttcatctatgaccggattaagagtggcgacctgccaaaagccaaagttatccacgggcgagcaagatggttatatcgtgaccattgtgaattcaaaaataagctcttaagccgcgccaatgggtaaaatagcgggtaaaatatttctcacatctaaaaaacaccattccaatcaatcccctgctgcttcaagtagatgtctgcaggggacaccatccttgtgtttatccctaaaaccacataaaaaccgtaaattaaattcgaactagcaggccgaataaggcacaccaggaactcgtggttttattcattaactagtggtttttacctgttctcttagccagataataaacgcttcaatttttggccactgcctgcccggtaatgtggtgatgtaataatgctgatggcatttcaccgtcatatcgccaaacggcgcgacgagctcaccactggcaagccttttttgtaccaggcgttttcttcccatcgccaccccaatatgattcatcgcggcaataacagctaaatcagaacgatcaaagccaattccagaagatgtcggcaaattaaccgcataatgttgcgcccaactatgccattcatccgtaccggagtcgttgctccatgcctgtctgtcatggagcaacgtacagtgacacaggttaattaccgtgttggttaaagcatgtctttgagcgtattccgggctacatactggcaggatttcttcatccatcagaaagtgatgagtgagttgcgcactcggcgcatcatcaaagtagatcgccaaatcgattccggcacgttgcagattgacgttgtcattaccagtgagcacggtgaggctaatagacggataccggcgtgtaaagtcacctaatgcgggcaccaaccagcattgggcgatagagggccgggaatacagagttaacgttccgcttaactcctgatttttgatatcaagaatttcctggttcagggtatccaggctgctttttagcgcccaataaacacgtttcccctcgtgcgttaattccactttgcgatgggaacgaacaaacaactgaatgcccaattcttcttccagctgattgatacggtgacttaccgcactggggctcaggctcaattcctctgccgccagggcgaaggactgatgcctggcagccacttcaaaagtatgcattttacttaattgccagccgttaagcagccgatttcttatttcacgaaggggttccataatcacctcatttttcgcttaagtgtaaaaaaatagcggcaaaatttcagctatgagatgagctaaagtgaaccatatctcaattcaccttcatttttagatgtaaatcactccattgatgcaatttacctcatgtgaaaggcaaattttatcgtttgtcagcctgcgttgtttttttgtccaatatcatcaggttaatcacaggggaaggtgagatatgcactctcaaatctgggttgtgagcacgctgcttatcagcatcgtgttaattgtactgaccatcgtgaagttcaaattccacccgtttctggcgctgttgctggccagcttcttcgtgggaacgatgatgggcatggggccactggatatggtaaatgctattgaaagtggaattggcggaacgctggggttcctcgcagcggttatcggccttggcacgatactgggaaaaatgatggaagtatccggggccgcagaaagaattggtctgacacttcaacgctgccgctggcttagtgttgatgtcattatggtgctggttggcctgatttgtggcatcacgctgtttgttgaagtgggcgtcgtgctattgattcctctggcttttagtattgccaaaaaaaccaataccagtttattaaagcttgccattccgctatgtaccgcattgatggcagtgcactgcgtggttcctccacatccggctgctttatatgttgccaataagctgggcgcagatatcggtagcgtgatcgtctacggtttgctggttgggctgatggcaagtctgatcggtggcccacttttccttaaatttctgggtcaacgactgccctttaaacctgtacccacagagtttgcagatctcaaagttcgcgatgaaaaaacactaccgagtttaggcgcaacgttattcaccatactgctacccattgcgctgatgttggttaaaacgattgccgaattgaatatggcgcgtgagagtggtttgtatatcttggttgagtttattggcaaccctatcactgccatgtttatcgccgtgtttgtcgcctattatgtgttgggtatacgccagcatatgagcatggggacgatgctcacacatacggaaaatggcttcggttctattgctaatattttgctgattatcggggccggaggcgcattcaacgccattttaaaaagcagcagtctcgctgatacgctggcagttattctctccaatatgcatatgcacccgattcttctggcctggttagtggctcttattctgcatgcggcagtgggctccgctaccgtggcaatgatgggggcaacggcaattgttgcacccatgctgccgctgtatcccgacatcagcccggaaattattgcgattgctatcggtagtggtgcaattggctgcactatcgttacggacagccttttctggctagtgaagcaatattgcggcgctacgctcaatgaaacatttaaatactatacgacagcgacatttatcgctagtgtcgtcgctctggcgggcacattcctgctgagttttatcatctaagcgcaaagagacgtactatggaaaacgctaaaatgaacagcctcatcgcccagtatccgttggtaaaggatctggttgctcttaaagaaaccacctggtttaatcctggcacgaccagtttggctgaaggtttaccttatgttggcctgaccgaacaggatgttcaggacgcccatgcgcgcttatcccgttttgcaccctatctggcaaaagcatttcctgaaactgctgccactggggggattattgaaagtgaactggttgccattccagctatgcaaaaacggctggaaaaagaatatcagcaaccgatcagcgggcaactgttactgaaaaaagatagccatttgcccatttccggctccataaaagcacgcggcgggatttatgaagtcctggcacacgcagaaaaactggctctggaagcggggttgctgacgcttgatgatgactacagcaaactgctttctccggagtttaaacagttctttagccaatacagcattgctgtgggcagtaccggaaatctggggttaagtatcggcattatgagcgcccgcattggctttaaggtgacagttcatatgtctgctgatgcccgggcatggaaaaaagcgaaactgcgcagccatggcgttacggtcgtggaatatgagcaagattatggtgttgccgtcgaggaaggacgtaaagcagcgcagtctgacccgaactgtttctttattgatgacgaaaattcccgcacgttgttccttgggtattccgtcgctggccagcgtcttaaagcgcaatttgcccagcaaggccgtatcgtcgatgctgataaccctctgtttgtctatctgccgtgtggtgttggcggtggtcctggtggcgtcgcattcgggcttaaactggcgtttggcgatcatgttcactgcttttttgccgaaccaacgcactccccttgtatgttgttaggcgtccatacaggattacacgatcagatttctgttcaggatattggtatcgacaaccttaccgcagcggatggccttgcagttggtcgcgcaagtggctttgtcgggcgggcaatggagcgtctgctggatggcttctatacccttagcgatcaaaccatgtatgacatgcttggctggctggcgcaggaagaaggtattcgtcttgaacctagcgcactggcgggtatggccggacctcagcgcgtgtgtgcaagtgtaagttaccaacagatgcacggtttcagcgcagaacaactgcgtaataccactcatctggtgtgggcgacgggaggtggaatggtgccggaagaagagatgaatcaatatctggcaaaaggccgttaataacgtttcaacgcagcatcgcaatcctttccctgggtgagcgatgctgccgatggcgcagacttaagatccccggtcttacccgctataaccccctccttttatcatcacccaacgcctttcgctgtaaacggcggtttcgcaaaccaaaccaaaaccgtaagtaagataaaagcaatagccgccatacggaaaatctcatttgcagaaatagaaagactctgctgggttatttcattattaatttcattaagaactccactaaggctaccataatatttatccataatttgactgctactattaaacacggggttaaattgatcgatggttgctgtcaactgactatggtgtaagctttcgcgtcgtccccacagcgtcattgtcaagctcgtaccaacacttccactcaaggtacgaaaaaaattactcatactgctggcattggcaaatttattatctggcaagccactaaagctaatcgttgttaagggtaaaaagaaacaggcaacggcgaatccctgaaaaaactgcggcaaaatgatgcctgtaaaatcaatcgttggcataaatgtcacagaacgccagtaatagcaaaccgcatacatcaaaaaactaaatgtcactaacaaccgcatgtctattttgttgccataacgtcctatcaaaggactaattaatagtggcatgatgccgatgggcgcataagcaagtccggcccatatcgcattataccccatcgtttcctggagtaactgcggcataaggacgatcgctccagagtaaaataaatacgcgcatgtgatactcacaataccaatggtgaagttacgggacttaaacaaactgagatcaagaatcgggttctcactggtgctctcccaaatgactaaagagatcagagaaataacacttactactgttaatattattattgtactgctgttgaaccaatccagatcgcgccctttatcaagcataatttgcaagccaccaacaccgagcactaacagggtcagtcctggtagattcattttgaccggactagtctcagtttctcttcctttaagtaaggttaagcataatgtcaggacgataatccccatagggacattgattaaaaatatccaaccccagctaaagttatcacaaatataaccgcccaatatcggcccacatatcggagcgataatcacggtcatactccataatgccagagcaaatgttcttttttctggcggataattccttaataataaactctgactcagtggaattaacggccccgccattaacccctgaacgactctaaaaaatatcagcacatcaagattggtgcttaggctacacattaaactagacaggctaaaaaaagtgacactaagtaaaaataatcttaattcgcctattctttgtgccaacctgccagtaacagggatcgcaatggcatttgctacaccaaagctggtgataacccaggtgccttcgtctgtacttgctcccagaaagccagatattgtcggtattgcgacgttagaaatagtggaatccaacatttgcataaatgtcgctaaactcaatgcaatagtgacgcaccataacgtcccaccggttaatggtgccggagtacttttagtgattgccattaaagttgtccattatggctaataatgttgctaatttctttttctatcggactggtatcgataactaaagccttactggtataagccggcatggaggtcacggtactagccagctcaggcatctcggcaatgtcttcgttcttcgtatcaatagttgctgtcatgcttaaaccaatacgcaaggggtgttccatgagttcttttggatcaagagaaacttcaaccggtacacgctgaacgattttgatccagttccctgtcgcattttgtgcaggtaataaggagaacgcattgccggttcccatattgatccctgtcacccgaccatgaaacacaacattttcaccataaagatcgctgataatattgacgctttgaccaatccgtacatccgtgagttgtgtttctttaaagttggcattaacccacatttgacgtgccggtacgacagccattaagctttgtccggggctcactgtttcgccgacctgaacacttctctgggcaatatagccggtaaccggactcttaatatccgtacgtttaagcgccaaccaggcttctttagttgcatccgccgcttcaacgacttgtggctgacggtttaatggtgtgttcattactaaagctttattcgctttataagcctggatagcggcattcaatgccgctttgctacttattaacgtatctttggtatgctccagcgtttctttactaataaccccctgcttcgctaacggcactcgacggttataatcttctaaagattgttgatactgaatacgtgcactagcgacttcggcactgtattgtttatcctgtaagtatagtttattcgtttgccgaacaatatttgccagattatttttagctttattgagtgcgatagtggcatcagttttatccagactaactaaaatgtcaccttgtcgaacgtagttcgtatctttatgattaacgacagtgacactaccactgacttgtgcagaaattggatctgcattccccgtgacataggcgtcatctgtactaatcatgtcttctaattccatactccaataggcataggcaccactaaacgcaataaataaaactaccgccaataaagaaaagtattttcttctgttagaatgttttttattactattaatctgttccactattatctctcatttctcatagatgaaatttatgaattgaatgaaaagagcattcattcttcatatcaaacacagtgcatgtgttgcacattatcccaggaacgttggaggcctaatttaaatgaggtgcaaaaaaaacaacagaggactaaaccgtggcttttgcaatacaattcttacgcctgtaggattagtaagaagacttatagtgccaacttgaaactataaatcatcggtacaatccctgattttattgttgacatttcatttatgccgactatttatatggtatacttgtcgaattatcttaaaggaagctcagattttcttatttttattgagaaaatgagatgacgccttatgtctgtattactacagggagaagggagatgcttcattgcaaagggaataatctatgaacgcaataattattgatgaccatcctcttgctatcgcagcaattcgtaatttattgatcaaaaacgatattgaaatcttagcagagttgactgaaggcggaagtgccgttcagcgggtggaaacacttaagcctgatatcgtcatcattgatgtcgatatccccggagttaacggtatccaggtgttagaaacgctgaggaagcgccaatatagcggaattattattatcgtctccgctaaaaatgaccatttttacgggaaacattgtgctgatgctggcgctaatggtttcgtgagtaaaaaagaaggcatgaacaatatcattgcggctattgaagctgcaaaaaatggctactgctatttccccttctctctcaaccggtttgttggaagtttaacgtccgaccagcaaaaactcgactccttaagcaaacaagaaattagtgtcatgcggtatattcttgatggcaaggataataatgacattgctgaaaaaatgttcatcagcaacaaaactgtcagcacttataaaagtcgcctgatggaaaaattagaatgtaaaagtctgatggatctttacacattcgcacaacgtaacaaaatcggctaaccacatgaagtttttaccctatatttttcttctctgttgtggtctttggagcaccataagtttcgcagacgaagattacatcgaatatcgtggcatcagtagtaacaaccgtgtcacacttgatccactacgtctgagcaacaaggaattacgttggttagcgagcaaaaaaaatcttgtgattgcagtacataagtcccaaacggctacgttgttgcataccgatagccagcaacgggttcgtggtattaatgctgattatttaaatcttttaaaaagagcgttaaatatcaaattaacactccgggaatacgcagatcatcaaaaagcaatggacgcgcttgcagaaggtgaagtcgatatagtgttaagtcatttagttactagcccgcctcttaataatgacattgctgcaaccaaaccattgataattacctttccggcgctggtaaccacccttcacgacagtatgcgaccgcttaccagtccaaaaccagtaaatattgctcgggtagcaaattaccccccagacgaggtaattcatcaaagttttccaaaagcaacaattatctcttttacaaatttatatcaggcattagcatccgtcagtgctgggcacaatgattactttattggtagtaacatcattaccagcagtatgatttcccgctatttcactcactccttaaatgtagtgaaatattataacagcccgcgtcaatataattttttcttgaccagaaaagaatctgtcattcttaatgaagtactcaatagatttgttgatgctttaacaaatgaagttcgctatgaagtaagtcaaaattggcttgatacaggaaacctggcctttctgaacaaaccattagaactcactgaacatgaaaaacagtggattaagcagcatcccaatttaaaggtgctggaaaatccttacagccccccctattctatgacggatgaaaatggcagcgttcggggcgttatgggggacattcttaatattattaccttgcaaacaggtttaaatttttctccgatcaccgttagtcacaatatccatgctggaacacagcttagccccggaggatgggatataatacctggcgctatttatagtgaagatcgagaaaataatgttttatttgctgaagccttcataacaacgccttacgtttttgtcatgcaaaaagcgcctgacagtgaacaaacattaaaaaaaggaatgaaagttgccattccatattattatgagctgcatagccaattaaaagagatgtatccggaggttgaatggatacaggtcgataatgccagcgctgcatttcacaaggttaaggaaggtgaacttgatgctctggtcgcgacacagctaaatagccgttacatgatcgatcattactatcctaatgaactttatcattttcttattcctggcgttccgaatgcaagccttagcttcgcttttcctcgcggagaaccggaacttaaggatattattaataaagcactgaatgcaattcccccaagcgaagttctgcgcctgacggaaaaatggattaaaatgcccaatgtgaccattgacacatgggacctatatagcgagcaattttatattgttacgacattatccgttttattagttggcagtagccttttatggggattctacctgttacgcagtgttcgtcgtcgtaaagtcattcagggtgatttagaaaaccaaataagtttccgaaaagcactcagcgattccttaccgaatccaacttatgttgtaaactggcaaggtaatgtcattagtcataatagtgcttttgaacattatttcactgcggattactacaaaaatgcaatgttaccattagaaaacagtgacagtccctttaaagatgttttttctaatgcgcatgaagtcacagcagaaacgaaagaaaatcgaacaatatacacacaggtatttgaaattgataatggcatcgagaaaagatgcattaatcactggcatacattatgcaatcttcctgcaagtgacaatgcagtatatatttgtggttggcaagatattactgaaacgcgtgatctaattaatgcactcgaggtagaaaaaaataaagcgataaaggctaccgtagcaaaaagtcagtttctggcaacgatgagtcacgaaataagaacaccaataagctctattatgggcttcctggaacttctgagcggttctggtcttagcaaggagcaacgggtggaggcgattagtcttgcctacgccaccggacaaagtctcctcggcttaattggtgaaatccttgatgtcgacaaaattgaaagcggtaactatcaacttcaaccacaatgggtcgatatccctactttagtccagaacacttgtcactctttcggtgcgattgctgcaagcaaaagcatcgcattaagttgcagcagtacgtttcctgaacattacctggttaagatcgaccctcaggcgtttaagcaggtcttaagtaatttactgagtaatgctctcaaatttaccaccgagggggcagtaaaaattacgacctccctgggtcacattgatgacaaccacgctgttatcaaaatgacgattatggattctggaagtggattaagccaggaagaacaacaacaactgtttaaacgctacagccaaacaagtgcaggtcgtcagcaaacaggttctggtttaggcttaatgatctgcaaagaattaattaaaaatatgcagggcgatttgagtttagaaagtcatccaggcataggaacaacatttacgatcacaatcccggtagaaattagccagcaagtggcgactgtcgaggcaaaagcagaacaacccatcacactacctgaaaagttgagcatattaatcgcggatgatcatccgaccaacaggctattactcaaacgccagctaaatctattaggatatgatgttgatgaagccactgatggtgtgcaagcgctacacaaagtcagtatgcaacattatgatctgcttattactgacgttaatatgccgaatatggatggttttgagttgactcgcaaactccgtgagcaaaattcttccttacccatctgggggcttacagccaacgcacaggctaacgaacgtgaaaaagggttaagttgcggcatgaacttatgtttgttcaaaccgttgaccctggatgtactgaaaacacatttaagtcagttacaccaagttgcgcatattgcacctcagtatcgccaccttgatatcgaagccctgaaaaataatacggcgaacgatctacaactgatgcaggagattctcatgactttccagcatgaaacgcataaagatctacccgctgcgtttcaagcactagaagctggcgataacagaactttccatcagtgtattcatcgcatccacggtgcggctaacatcctgaatttgcaaaagttgattaatattagccatcagttagaaataacacctgttagtgatgacagtaagcctgaaattcttcagttgctgaactctgtaaaagaacacattgcagagctggaccaggagattgctgttttctgtcagaaaaatgactaaatagcggctcccacaatgttcaaatgtgggagctatttaccagcacatcttacatttaactactgaactcctggcgaatttgttccccatgctggtcgagcgttgccgctcccggcataacatgcgggtccgcgcagccgctgatttttatcggattacccggcatcattattcccccggcttcaatcaacatatttctcgcctgagtttgtggcaatttaatggcctcagccacacttaataacggcgcgacgggtacaccaacttcatgtattctggctaaccaaacttcagctgcctgcgtttttaacgtccgctcaatatattgtttaagaatagcctggttttgtacgcgtaaaatattgctgctaaatcggggatcattaaccagttccgtaagctccagtgcctggcataacgcagaaaaaagcttgtcattaccacaacaaatcgtaatcggcttatcctgagtattgaaaacatcaaaaggtgccatgtagggatggcgatttcccagacgttgtggactcttcccagttgcgatatatgccatcagaccatgctccagaaaactcagcgtggcatcaaacatcgctatatcgacatgcgcccctctctggctcttttcgcggccataaagtgcactcactattccgctgaataaatagacaccgccgcatagatccgcaagagatgtaccaacgcgcactggcggagcatcaggatatcctgtttccatcattatcccgctcattgcctgaatgatggtatcgtaggcaggagcatcttttagcggaccggtatgtccgaaaccactgctactagcatatatgaggcgcgggttgatttcttgaagcgtttcccaactaaaccccagtttttccattgtacctgggcgaaaattctcagctaatacatcagcttgtttgagcatatttataaatatacttttatcgtgatcattctttaaatcaagaaccacactctctttgccatgattaataaaactgtaatagagactctgtccatccacatagggaccaaatgtgcgggtatcatcaccatgacccggcggctcaactttaattacccttgcgcccatattacaaagaagttgagttccgaaaggtccattaaggacatgtgtcatatcgataactaataagccttcaaacggccctttgctttcattatttgtcatttgcttatgccttgaaaaaagccgaaggtgaaaagacacttcggcatttatgtaaaatcaataacatgattaattaactaaccagtcgactgacataaatccacaagggagccgtgacgacaaagcccagtacgctcacagccaaactcgctgtaccagtacgggtgtagacattaaaccggctggcaataatgattccggagaatgccggcggtaatgcgcctgccagtaccatcatctgcagatgttcgctgttcaaatgacatgccataccaacgagaagcagtgccagtggcatcagaatcagcttcaggaaggtgttataagcaatttcggcactgaactcgaatttatgtgcagccagagtcaaccccgcagcgaataccgctaccccactgttagccttcgcaatcagattaaaggttgggtcccatgctgccggaatttttaccccaaccaacaccaggatcgttgccagaacaggtgcccatactactggctcctttgccgcagaaattaatgcgctcagattactattcttcttaccatccgctccactagaaggattcagcaaatacagaccaataggaatagtaattgcgttaacaataatagaaataattgctaccactaaacctgtacttacggaatcaccataaataggatcgagaactgcaaaccccaggaatccaatggtaggactacctgcaattaatgcacatacagctgcttctgcatgggtacgtttaaaaaatttgtagcaaccgaaccaggagaaaaagaaacatccgacaataaccacaagacttacaagggtcagacgagtgtccgcaaaaatcatttccctgtttgcccgagtaatagatacaaatagagccgcaggaagcgcgtagtttaataccagtttattaaatgcccgagcttgatcttcactaaatgtttctcgtctgccgctaaaataacccaacagcatgattacgataataggcaataaatcgccaataaaaaatgttagcataatagtatttccgataagggtcccctcaccatcgcataatgagttggcaagaggagacgatgtcagtatttaattaccagcgacttgttttgggttaagtttggtaatatggccactttcagttcctgctgcagggtcgatgaccacattaataatggtcggtttgcggctctgaataccggtggttaaagcatgacgaagttcatctgtcgtggtgacgttatagccaacgccacgaaacgcatccattaatttgtcataccttgcatggtgcaacagatccgttggacttggtgcaccagcgccactgagatcaacaccgtctcctctgtagatgccgccattattaaaaataacgatcgtcaccggcaggttatatcgacaaatcgtttcaatttccatcccactgaaaccaaaagcactatcaccttcaatggcgacaaccggagaaccagaagtcacgctagcaccgatggcatagcccataccgatgcccatgacaccccaggtaccacaatccagacgacgacgtggtttatacatatcaataatatttcgtgcattatccagggtatttgcaccttcattaactaaataaatatcctggttctcgcgcaatacgtcgcgcacagcacttaatgcattaaagtaatttaatggttgagtatctgtacttaatttttcatgcattttttgtgcattttgctgcttgtggatatttaaaatatcgcgccataccagtggagtcgtaaatgtgttttgtttcagttctgccagcataccttgcatactggatgcaatatcaccaacgactggcacagcaatggggcggttgctgtcaatttcctgcggttcaatatccagttgaataaactgtgtatctgccgcccatccttttttaccgtgtgccaataaccaattcagtcgtgcaccaacaagcatgacaacgtcagcatttgccagggcaaagctacgcgcagctgccgcagaaagtggatgcgtatcttcaaggatccctttcgccatagacattggcaggaatggaatctgagcactttcaataaattcacgaagctgttcatcagcttgactatacgccgcgcctttgccaaggataattaatggccgttcagcttttgctaaaaggctaattgcgctagtgacactcttcgggcatggcaataatgctgggctcggattttcaactttaacaatcgtggttaacgcttcgtctttttccatcgtcgcggccaggacatttgctggcaaatcaagataaactccgccagggcgaccgcttacagagacccggatagcgcgtgccaatgcaatgccaagatcctgcggctgattaacgcgaaatgctgctttggcatacggttttgccgcattcatttggtccagctcttcataatcaccttgctgtaggtcgacgatcgcgcggtcgctggagccgctaatcatgatcatcggaaaaccatttaccgttgcgttggccaatgcggtcaaaccattgaggaatcctggcgcagaaactgtcaggcagatccccggtttttgggtaagaaaaccgcttgccgcagcggcatagcctgcgctctgctcatgacgaaaaccaatataacgaatgccttccgcctgggcatggcgtgccatatccgtcacaggaatacctacaacaccataaatagtgtcaatattattctgttttaatgcttcaacgatgatatgcataccatctgtcatttgaagttgatcactcatgattaataacctcgaaatttttataaattgggagccagaagcccccgttaatatcagatggcgtggttttgcttcattgcagcaatttcatcgtcgctataacccagctcctgcaatacagcagcggtatgttcacctaatagcggcgcagctttaatatccggcgtaaaggcagagaatttcattggacaaccaacggtcagatattttccacgcaacggttgttccacttcaacaacactgccactttggcgcaaagagggatcaagactaatttctttcatacttaaaaccggtgcacaaggaatatcaaactgagtcaaataggccaccgcttcatgtttatcaatagtgacagtgtatttttcgatttcagcaaaaatatcgaaaatatgtggctgtcgtgcatgggctgtactgtatgccggatcggtaatccattctggtttgccgatggctttacaggtgttttcccagttttgctcctgaatagtgaaataaatataggcgttaggatcggtttcccagcctttacatttcaggatccagccaggctgaccgccaccacctgcattaccaccgcggggaactgcatcaccaaatgtaccattcggatactgcgggtattcttccagataacccaatttatcgagacgctgctggtcacgtaatttcacgcggcaaaggttcaatacggcatcctgcatactcatggtgactcgttgcccacgccccgttttttcgcgatgcagcaaagcagcaagtaaaccgatcagcaaatgcattccggtgttgctgtcacccaacgctgcagcgcttaccagcggcggaccatcccaaaaacccgtagtggatgccgcgccacccgctgcctgagcaacgttttcataggcttttacattcacataagggctacactcatcaaaccctttgatgctaccaaaaatcagacgtggattgatttcttgaatatgctcccaggtgaagcccatgtgatcaatggcccctggatgaaagttctcgactaagatatcagcttcgcggatcagcttttccattacctctttgccttccgctgttttggtatttaactcaatagaacgtttgttactgttaagcatggtgaagtaaagcgcatcgatatcaggaatatctcgcagctggtgacgcgttacgtcaccaacgccgggacgttcaattttaataacgtcagcgccaaaccaggccagcatttgagtacaagatgggccagattgcacaccggtgaaatcgagaactttaattccttgaagtggagtactcatagcaatacctattagttaattaaatatgtgttaatttagcgtttatttaaggcgtaatatcttctataaataacccgcaaaatatcgtcgtagctgcactcgatatttttaaaatcctgtatcaagtgctgaaaatcatttcatcgccacttccaattcctttctgcatggtaagtagtgaggacgaaaagaagaatatgataaatattgattcgtggtaatcagagagagtcgcgacatttgtgatgttattcttacaactgtaagaagcgccggtgatttacaagcaagggtatgattacgctttttaaagcgtaccataaaacataacataataaatgatttgtgatgacacgggattattgcggtttactttgaggaatataaaatgcgagtttatagcaccgcgagcgccaaataattttatgaccacaacctgtcgtattgtggtcataaaaaattgtcggctggagggagttaaatcctttacctcaatatactgcctgtcagcattagttcacaaacagtgcttcgctatcgacgatgattccatcttccgcacctttaagcgccaggtttgcctcgtagtattgctttttatcaagcagtttctgcgcatcagcaagtgcattacgagtctgtttaagtggcatcagatattggttttccattacgccaacaccggccaggcgaagctcttccattgcgccctttttatcccctttcgccattttttcattggcaatttttatcgcggcttctttttcgggagttgctacataactctcagaaattccgacagatgcattaatgacaatatattggtcatcattgagattggtctttttacctggcttagcgaactttgcccattcggtactgtcatcactcagcaaagcggaagcttcattggtcagttcttttgccttttctggatcgccatgaaacagagccaggcgcgctacctgcacgtcacgcatcgcatataaaccttgttcagagatacgctctgctgccgctgccgttttctgggtttgctgaacttgctgagtttgctgttgtgccgctaccggagcattatcagcagcccatacagtactagatgccagaattgctgtgaccatcgtggccataattaaacgtttcatacttacctcattctttaacagttttagaaaacgccgccatcatattgggtgagcatgaaatgagaaatcagagagcaacggtcattttgaaagggttatcttacagttgtagttattatcgcaagaagtattttagtcttacaattgtaggaatatgcttcctgtcgcagagaactattcttatataccacaaagagatgtcatttattatatcgatgtaaatactgattaattaaatgtaaatacagccataacatcgtaggttctcagtgaaccattttcaggataactttctatgaaagtaaacttaatacttttcagcttatttttattggtctctattatggcatgcaatgtttttgcattttccattagcggtggtggaagtgagaggagctataaagagactgaaaaaacaagtgcgatgacgaccacacactctacaaaacttcagccaagtcaggcgattttgtttaagatgagagaagatgcgccaccattaaacctcacagaagaaatgccgcccccttttccgacaaaggcgaattatcttattcatcctgtgcgataacgtctttcacatggcaggtgaacaatcatgtctgatgctgatgtgaacacctgcccaaatgagccatcctgacccattaccgcctgccataccccaccataaagcgaatcatcaagccacaagccggggcaagaaacataaatatccccgtcactagttcattaccgccagttaaccacatggtgaagtaataaatgagtgcagcgaggatcaccatgccgaagaaagaagagaccgcgcttaccacgttcagtacctgaccgatgtagccgcttacgcagacaatacacagggcgagaaacatccataaattaatcatagctcaacctcctgccgcgctaaaaaacctgtaacttcagtcactttaatagtaagacaatccttaacctctggcaatttttgctaagcatcaatgaaaacagcatgttaaatgcaagactgttgtgtacggaaaaatatttactttgcacgattaataatcagtagctgaaagcagtcagcgagtgataaagtacagataccgcattcatgctcctcgtggttatgtcctgactagtctttacactctttacaggaaccattgtcgtacatgatggcccaaccaattgagtgtaccgctgtcgacatggaatcttctgcgatacaacaattcgtatctacagaaggtaactatgtttccacaatgcaaattttcccgcgagtttctacatcctcgctactggctcacatggtttgggcttggtgtactctggctttgggtacagcttccttatcctgttctctgctttctcggcacgcgtattggcgcaatggcgcgaccattcctgaaacgtcgtgaatctatcgcccgtaaaaacctggaactttgtttcccgcagcattctgcggaagaacgcgagaagatgattgccgaaaactttcgtagtctcggcatggcgctggtagaaaccggcatggcatggttctggcccgacagtcgcgtacgtaaatggtttgatgttgaagggttggataaccttaaacgcgcacaaatgcaaaatcgcggcgtaatggttgtcggcgtccattttatgagcctggaactgggcggccgcgtgatgggactgtgccaaccaatgatggctacctatcgtccacataataatcagctgatggaatgggtgcagacccgtgggcgcatgcgctctaacaaagcgatgatcggcagaaataatctgcgcggcattgtcggtgcactgaagaaaggtgaagcggtatggtttgctcccgatcaggattatggtcgtaaaggcagctccttcgcgccgttctttgcggtggaaaatgtcgccacaaccaatggcacctatgttctctcccgtctctctggcgcagccatgttgaccgtaacgatggtaagaaaagcggattacagcggatatcgtttgttcatcaccccagagatggaaggctacccgacagatgaaaatcaagccgctgcctatatgaacaagattatcgagaaagagatcatgcgcgcaccggagcagtacctctggatccaccgtcgctttaaaacgcgcccggtgggagaaagcagcttgtacatttaacaaactgctcttactctttccctcctcaaatcggccataataacctcatggtttttatggcttttttcttaaggttttttccttcgctgaatatctaattattaccgtcagaaattaaactgtcgccgatatgagacacttgtaagttactaaaagtaaataagaaaatgcctcttgtctcgtttcagttttaggcgtacattagcgccgtctcgagcagtttagctcagaattctggggtgatgcccacggtaaaatacagggcttttaaggtcgctttgcccggtgtcaactcactgtatcaggtgtaatgaagtcattcaggcgtaacagtaattacgcggagagatgtaaagtgaaatatttctttatgggcatttcttttatggtcatcgtttgggccggtacttttgccctgatgatctaaaagcaaactgtgcaatgaaaaacaggagccatcaggctcctgtttgcatttctgacgacggtgtttattccgcgttttcgtgaatatgtttgctgctggcgggtagtaaaccgtcggcacggaacatcgctttaatccctctgatggcctgacgaatacggtcgcggttttcaatcagtgcaaagcgaacatgcgtatcaccatagtcgccaaagccaatccccgggctgacacaaaccttcgcttcgttaaggagcttcttggcaaattccaggcttcccatggccgcatatggttccgggattttcgcccagacatacatgctagccttcggcatttcaaccatccagcccgcttcatgcagccctttaaccaatacatcacggcggcgtttgtactgttcggcaatgtcgcgcacgcactgttgatcgccctccagcgccgcaatcgccgccacctgcaacggcgtaaaggtgccgtaatcgtgatagcttttaatacgagccagggcgctgaccagcgttttgttgccaaccataaagccgatacgccagcccgccatgttgtagcttttgctcagcgtaaagaactcgactgccacatcgcgtgcacccggtacctgcataatactcggcgctttccagccatcgtagacgatatcggcataggccaggtcatggaccaccagcacatcgtagcgtttcgccagcgccactactttttcgaagaactccagttccacgcattgcgcggttgggttactcgggaagccgaggatcatcatcttcggtttcggataactttcacgaatggctcgctccagttcgttgaagaaatcgacaccttccaccagcggcacactgcgtacctgcgccccggcaatcaccgcgccataaatatggatcgggtaacttggattcggcaccagcaccgtgtcaccatgatccagcgtcgccagcatcagatgcgccaggccctctttgctaccaatagtgacgatggcttcactttccgggtcgatttcaacgtcgtagcgatcctgataccagcgggaaatggcgcgacgtaaccgcggaatgccgcgactagtggagtaaccatgcgtgtccgggcgctgggccacagtacataatttttcgacgatatgcggcggagtcgcaccgtccgggttacccatgctgaaatcgataatatcttcgccgcgccgacgcgcagccattttcagttcagcggtgatgttaaaaacgtagggcgggagacgatcaatgcgcgtaaagcgacgttcagggcgagtgtcagccataatttcctcagattaacgttagcgcccggaccgtccgagcgacgctgccacgatggtggctgttttgaaaatagcctgattaatttctgtctgtccagtgttttagaacattttattaatgacgttaaatgaggaactctgctttaaaaacaggaaatttatctgcgctaacaagaaaattaccactcattttattaacataataatttcaataaatttactaaccagaagtgcattatcaagagatgcattgctaatacaccatttatctatcaatccccttttaaaattgtggtttttcctcaaaaacggcctgctggtcatcagccttcaggttacctatcatagaggtttaatccttattcagagtcacccgtgcacgaaatattcaacatgctgctggcggtcttcgatcgggcagcgttaatgcttatctgcctgttctttctcatccgtatccgcctgtttcgcgaactgttgcacaagagcgcgcactccccaaaagaattgctcgccgttaccgccattttcagcctgttcgccctgttcagcacctggtccggcgttcccgtagaaggcagcctggtgaacgtacgtattatcgcggtgatgtccggcgggattctgtttggcccgtgggtaggcatcattaccggcgtgattgcgggtattcaccggtatttaattgatatcggcggcgtgacggcgatcccctgctttatcaccagcattctggcgggttgtataagcggctggatcaacctgaaaatccccaaagcacagcgctggcgcgtcggtattctcggcggcatgttgtgtgagacgttgaccatgattctggtaattgtctgggcaccaactaccgcgttggggatcgatatcgtctctaaaatcggcattccaatgatcctcggtagcgtctgtatcggctttattgtgcttctggtgcaaagcgttgagggcgaaaaagaggccagcgccgcgcggcaggccaagctggcgctggatatcgccaacaaaacgctaccgctgtttcgccatgtcaatagcgagagtttacgcaaggtctgcgaaattatccgcgatgacattcacgccgatgcggtggcgattactaataccgatcatgtgctggcctatgttggcgtgggtgaacataactatcagaatggcgatgacttcattagcccgactacccgtcaggcgatgaattacggaaaaatcatcattaaaaacaatgatgaagcccaccgcacaccagagattcattccatgctggtgatcccattgtgggagaaaggggtcgtgaccggaacgctgaaaatttactactgccacgcgcatcagatcaccagcagtttacaggaaatggcggtcggtctgagccaaatcatctccacgcaactggaggttagtcgcgccgagcagctacgtgaaatggcaaataaggcagagcttcgcgccctgcaaagcaaaattaatccccattttctgtttaacgctctgaacgctattagtagcagtatccgtctgaatccggataccgctcgccagttgatctttaatctgagccgttatctgcgctataacattgaattaaaagacgatgagcaaatcgatatcaaaaaagagctgtatcaaattaaagactatattgccattgagcaggcccgctttggtgacaagctgacggttatctatgatattgatgaagaggtgaattgctgcattcccagcctgctgatccagccgttggtggagaacgccattgtccacggtattcagccttgcaaaggtaaaggcgttgtcaccatcagcgttgcagagtgcggaaatcgggtacgcattgcggtgcgagataccgggcacggcatcgatccaaaggtgattgagcgggtcgaagcgaatgaaatgccgggcaataaaattggcctgctgaatgtccatcatcgcgtgaagttattgtatggcgaggggctgcatatccgccgcctggagccggggacggaaattgcgttttacattcctaaccaacgcaccccagtcgccagtcaggctacgttattgctttgagccggagtgatattgtgaaagtcatcattgttgaagacgaattcctggcacaacaggaactgagctggctaattaaagagcacagccagatggagattgtcggcacctttgacgacggtctggacgtgttgaagtttttgcagcataaccgcgtcgacgccatttttctggatatcaatattccgagcctggatggcgtgttgctggcgcaaaacatcagccagttcgcccataaaccgtttattgtgttcatcaccgcgtggaaagaacatgcggtagaagcgtttgaactggaggcgtttgactacattctcaaaccgtatcaggagagtcgtattaccgggatgctgcaaaaactggaagcggcctggcaacaacagcagaccagcagtacgcctgccgcgacggtaacgcgtgagaatgacaccattaatctggtgaaagatgagcgaataatcgtcacgccaattaacgatatctattacgccgaagcgcacgagaaaatgacctttgtctatacgcggcgtgaatcctacgtaatgccgatgaacattaccgaattttgcagcaaactgccgccgagccattttttccgctgccatcgcagtttttgtgtcaatctgaacaaaatacgcgaaatcgaaccgtggtttaataacacctacattctgcgactgaaagatctggattttgaagtgccggtcagccgcagcaaagtgaaagaatttcgccagttaatgcatctttaatcgggaactttcatgaaagcaccaggcttgcccgccgatcaacaatttttcgccgatctgttcagcggcctggtgcttaacccgcaactactggggcgcgtctggtttgccagccagcctgccagcttgccggtgggcagtttatgtattgattttccccgtctggatatcgtgctgcgcggcgaatacggcaatctgctggaagcaaagcagcaacgtttggtggaaggagaaatgctgtttattccggcgcgcgcggctaatttaccggtcaacaacaaaccggtgatgctgttaagcctggtgttcgctccgacctggcttgggttaagcttttacgatagccgcaccacgagcttgttgcatcctgctcgccagatccagcttcccagcctgcaacgcggtgaaggtgaagcgatgcttaccgccctcacccatcttagccgtagcccgctggagcaaaatatcattcagccgctggtgttaagtttgctgcatctttgccgtagcgtggtgaatatgccgccgggcaatagccagccgcgcggcgattttctctatcacagcatttgtaactgggttcaggataattatgcccagccgctcacccgcgagagcgtggcgcagttttttaatatcacgcccaatcatctgagtaaactgtttgctcagcatggaacgatgcgttttatcgagtatgtgcgttgggtgcgaatggcgaaggcgaggatgattttgcagaaatatcatctgagtattcatgaagtggcacagcgttgcggttttccggatagcgactatttttgtcgcgttttccggcgtcagtttggtctgacgccgggagagtacagcgcccgttttcagggctaacgtcagaaggttaattctgtttccagcagcgtcaggatactttgtgcatcttgcgcggcaaacaagctctggcggaagtttttattcaccagtttacgcgccagctggctgaagactttcacatgattcatcccttcgttagcacccagcgtcagcatgatcaccagttcgacttcgcccatttcactctgccagccaatcggtttcgccagccgggcaatgctgatactggaatgacggatccactgagatttggtgtgcgggatcgctacgccaaaaccaacgccggtggtaacaatctcttcccgctgccagacatcttcttccagctcaaacggatgttcagtgcgcccgttaacgccgaggttgccgcacaggaactggatcgcctgctctttattgctaaaatcctgatcaacaaagatattctccagcgccagcagtgggcgaacgtcttcttccggcgtaaaggcggtgagtaacgcttcaatttcctgcgcactgcggcattcacatgcctgacgcgccagttcccgacacgcctcgctatccagttgacgaagctggcttttcaccgccggaatacgcgggctactcatactcagctcatccaggcccagcccaagcagtagcggcagataacggctttcaccgcccagttcaccgcaaatgcctacccatttgccccgctgatgcgcagtggtaactatttgctgcaacatgcgcaggaagcttggcgtaatcgggttatatagcgggcttacgcgcgggttattacgatcgaccgcatacagatactgggtcatatcgttggagccgatactgaagaaatcgacctcatcgcagaagtggtcgatgatgtagcacacgctcggaacttccaccatgatcccaagcgtaatcgtctctgcatgacgcaggccatcgcgcttaagctcaacgatcgctttttggatctcgcctttcacccataagatctgatcgaggctgtgaaccatcgggatcatcaactgggcgttgccgaaactggcggcgcgcaaaatggcccgcagttgagtgcggaacaggccagcaaattccgggtaaatacgtaccgcgcgatagccgaggaacgggttctcttcctggggaatattcagataaggaatgcttttatcgccgccgatgtccatcgtgcggaagataatcggcttgtcgcccgccgccagtagcacctgctggtaggcttcaaattgctcctgctcgtccggcgcgctgtcgcgatccatatagagcatttcggtacggaacagcccgacaccttccgcgccgttggcaaacgcgcctggcgcttccagagcggtgccgatattcgccgcaatatcaatacgcttgttatcacgggaataggccagctgcgcggcagcctgcgcctgttgtttttggcgtttatccgccagcgtctgcgcgacctgataataaccgctcaccgcgtcattcgggttaatcgccagcacgccgcactgggcgtcaagcactgcaggttgcccggcataacgggcaatcgcatccagcggcaagccactcagtaccgggatcgcgctggcacgggccagaatcagtgtatggctggtgcgcccggttttctccagaatcatgcccgcaagatttttcaaatcaaggctcaaaaactggcttggggttaaatcttcagccaccagaatggtcggtttttcaagcaccagcttgttgcgcggcttcagttccggccaggtgatatgcagcaactgttcgctgatatcgcgaatgtcgctaacacgttcgcgcagataatcgctggcagaggcagaaagtttggcgcaaacctgctccatattgctgatgatcgccgcccccagcccctgatgctgttctgtcatcaggcgacggatattgcctgcaaattcatcatcctgaatcaggctcaaatgggcgctgaggatagttttgctttcgccgtcacgctcacgcaattgctggttcagttgctcggcaagcgttgccaggctgtgctccagccgggtggaatcttgcgcactggcggggattgcccgataactgtcgaggctgtcgctttgtaacagggtcagcgtacccacgccgacgccgcttgccagcacattgccgtacagtaaatccgggttaaggcggcttaaactacgcggcagcggatgcgccgtcagttctgcctgcgtaggctgaacgctgtcgctgtcgataaagcgcacctggatgtactcttccagcacgcgccgcgcctgctcttcatcgctgccgctaatgttcaggctgcaactgtcattaaatagggtgccggtgccaatcagcgccaggctgcttttcgcatctgcctttgcgttctggcgatggttaataaaagtgatttcgctttgccactggctgcactgttctttaagttcccacgccggacgagcatgtagaccgttaggcaaaggacagagaaattgaatcgttaacataaccgctccgggttaatcaggagatcatctgaaatccgtcagttgaacaaccgtctcacgcgtaagacgttgaataagggcagataaaagttgctgcatctgcaaaatgtcgcggcaatcggcaatgcttgcggcgcaatgtccatggcgggttgctggccccatcaccactgtgggcacgccggtgccggttaagtgcaccgccccgccgtccgtgccgccgttgctgaacatatctgcctgcaacggcacgccaatttctgccgccacggtttcgacccaggcggtaagttttggcggcgcaatcaggctcttgtcgcttaacaccagcatcggcccgttaccaatctggcgatggttagccgcgccataatcaaagtttttcgcccagcaggcggtatcaagcacaatggcgacgtccgggctcaccgcgcgggtggcagtttgcccgccgcgtaatcccacctcttcgctggaacttgccaccagccacacttccgcaggtagttcggcgtcgtgcagttcgcgcagtaacgtcaccagcagatagcaaccgaggcggtcatcaaaggctttccccatcactcgctggtgagggagaacctgaaaagtggtatcaaacgtgacgcgatcgccgggacgaattcccgcctgcatcacttcgtcataggagcgcgcaccaatgtccacgcgcatggcgctgacgtcattcccctgccggtcgccgtcaagcaggcctggaattttgcactcttcacgggtggtgatgcgcaccggctgcagctggcgggcagccatgcgtacgttgccaaccggcagcacatcaatcgccccttcgcgggagatgctgcgcaccataaatcccacttcgtccatatgcgcacagatcatcaccttcggacctgtgctttcattcaggcggatcagcacgcttcccagaccatcaaatcgcacttctttttgcaggcgatccgcttcttccagcaggatctgccgcacttcctgttcgctggaggcgatcgcatctgcctcgctcaacgcttttaataggcttaaatccattatgcctctcccgtgagcaacactgttttcggcatggcgtagagcacttctgcgccttgcggggtaaccagcacaacatcttcgatgcgcacgcccccttgccctggcaaataaatccccggctccacggtcagtaacatgcctggctgtagcgtcgtggtgtcccgcggactaaaacgcggatcttcatgaacttcaatgccgatagcgtgaccggtgttatgaccgaaatagtcgccataacctgcttctgtaatgacccggcgcgcggcatcgtcaacctgctggcagcgcacgccggggcgaatcgcggagattgctgcgagctgtgcctgcaggacaatttgatagacgttaaacagcaggtgagattcggcgctcaccccttcgccattcaccagcaaggtgcgcgtcatatcagagcagtagccctgatacagcgcaccgaaatcgagagtgacaaactcgcccgctgcaacaatcttgtcgctggctttgccgtgcggcagcgccccacgccagccactggcgacaatggtgtcaaaagaggctttttctgcgccctgctggcgcataaaccactccagttcagcggctatctcgcgctcgctcatccccgcctgaataaagcggcgaatatgctctgcaccgcgatcagcaatcccacaggcgaggcggattttctccacctcctctggcgttttgatttgccgcagcacatccggcgtggcgctaaccagtttcgcattgagttcagactgccagcggtgcgcggtttcccaactcacctgctggccctcaaaaccgagcgtttgcaactgttcatcggcaatgatttgattgacgatagtggtaagcgtgttcgtcgcgtcaagcaaatgcagctggtagccttgcgcacgggcttccacctcaacgtaatagcggctatccaccagaatgtgcgcactttcacggctaatcaccacataaccacttccggtggagatccccagatgcggctgtttgttctgccgactggagagaagcactgcatccagttgttgcgccttaagccagtcgcgcaggctagcgagtaatgtcatctggattttccttcttacaggctatcgattaacaatttgcctttacggaacatcatcagacgcaggaacaccaccatcagcgcagttatgactgcccccagcgcgatccccgccatatagacgcccaggttagtgaccagcggccatgcccagatagcggactccgggaaccattgcactgcgcccagccagacagcggcggtactgccgacaatagcgccgaccatatagctcggaatggcggtgatggggctttccagcgcaaacggaatcgcaccctcactgatccccataaacgccaggaacatggcggtcttaccctgcggataaagttgagcgttgaacaggcgtttgccggttaaacgacggtcgataatggtcgccagccccagaccaatcggcggaataacgatagcgatagaacgagcggtgaccggtaatacgtggtcagtggtaaagctgaaggcaacaaaacctgcggctttgttgatcgggccaccaaggtcgattgctgtcgccgcggcgatccccattgcgtacatcagcgcgcccttctcacctgcggcagtcagcacagtacggataccgccgttgatccagccaccaaagggggtgatgacgtagtacatcgccagcatgacaaaaatggcggaaagaatcgggagcaaaaatgtggttttgaacgctaacaggaaatccggtaactggattttctggttcatccacttcacaaggtaaccggcaacgatagaaataatcagcgcaccaatgaaggtggacggcaccgggctagaggtcgcccattgcatagtgctgggatcgaagttcagcagttgcgtcggctgggtagacatcaacccgccgataaaaccagccgggaacgccagtttgccaccgatagagttcgccacaaaagcagcaaacatcggaatggcaaaaccaaacaacacgccgccgaaggactggctcagccaggcaaatttaagtaaggagaggtcgaaaccggagaatttcccgctattaagagcatccatgatgccgatctcagcaggaattttaagccagctataagcaatcagctggctgaaagcgaggatcacaccgcccataattaaggtcggcaccatgcgactaatcccactcatcacatgctgcgggagttcaccccagaagctggttttagaggcctgcggattcttaactgccgctgccgcaccggatgcgccaggcacaacggttgcactgcgttttttaatggccataacaattatccctgtcgaatattactgttgttcagaggcaatcatctcttcgatttctttgatgatgcccgcagcgtttttaattgcgtcctgcaaagtgatttcataaacgtcgcgactttcgaaacgttcgttatcttccggggtaactgccacggagtggatgatgatggtcgcttcggcgatatcctgcgccgtcaggcgattctggataccgtccgcgccctgggtttcaattttcacttcataaccggcttctaccgccgcttcttccagcgcctgagcggccataaaggtgtgagccaggcccatcgggcaggcacataaggcaatcagtttcttactcatcgttaattcctcgttcagtgatagttgacgagtgaaattatgaacgtgcaaaacaaatcgccgttaccagacaaataatgcatttactggagaattaatcccgctgtacggaagtgtgacgcaggtcgaccttgtgaggggacacaaagaaaaattgaataaactgtatgatttaaaagattatcgggagagttacctcccgatataaaaggaaggatttacagaatgtgacctaaggtctggcgtaaatgtgcaccggaaccgagaaggcccggattgtcatggacgatgagatacaccggaatatcatggacatattctttaaagcgccctttatcttcaaatgcggcacggaaaccggaggctttgaagaactcaaggaagcgcggcacgataccgcccgcaataaacacgccgccaaatgtcccgagattgagcgccagattgccgccaaaacggcccataatgacgcaaaacaggctcaatgcgcggcggcaatcggtgcagctgtcagccagcgcgcgttcggtaatatcttttggcttgagattttctggcaggcggttgtcagctttcacaattgcgcgatacaaattcaccagcccagggccagaaagcacgcgctccgcgctaacatgaccaatttccgcacgcaatatttcgaggataatggcctcttcttcactattcggcgcaaaatcaacgtgaccgccttcgcctggcaagcttacccaacgcttatcgacatggaccagatgcgcaaccccaagccccgttccggcaccgtaaaccgcaataggcttaccttcgaccggttctgcgccaccaaactgaatcagatgctcttttttcagcatcgggatcgccatgcttacagcggtaaaatcgttaataatttccagatggctaaaaccgagattctttttcatttcggcaatactgaacgcccaggtatggttggtcatcgccacccagtcaccggtaattgggcaagcgatggcaatacagccgtctttcacctcgaccttatgttcttcaagataaacgcgaatgaccgcttcgaggctggggtaatcaagcccactataggtcttagcctggctgatttcaccactggcaatatcacacagagcaagacgtgcgttggtgccgcccacatcaccgactaatgcatactttgtcattcttcaactgctccgctaaagtcaaaataattctttctcacactgtaaatacctgggggcataacaacaacgccggaaaggcaggctccctgtaaatatcgatctgggtcacacaattactttatcgtttcagcaccaattgcagcgatgcctttttgcaagctgggcaaactaagtatctgaccccgcataaggaatagaacacaggcggcactaacccggacgtagactgtattacaaaagcggcaaaaagcagagacaaaaaacccccgctttgcagcgagggttggaaatttggtggagctaagcgggatcgaaccgctgacctcttgcatgccatgcaagcgctctcccagctgagctatagccccacgatgcgtttacgtaccaagtttgctgggtgcaaaatttggtggagctaagcgggatcgaaccgctgacctcttgcatgccatgcaagcgctctcccagctgagctatagccccgtcacgtaaagcttgtcgagttgacgggcggcatcatatgaattccgcccgaatgtgtcaacggcaaattgcaacgtgtagtttcaatcgctgaaaaatcaggcaaatgaacaattttggaaaaccgctcgcattcagtagttattcatgtcacggtttcctgtaaagtggtgttataaaatgaactactaatagacccacatacattcagggaattgttatgttcaaggagaggatgacaccagatgaacttgccagactgaccggctatagccgccagaccattaataaatgggtacgcaaggaaggctggacaacgagtccaaaacctggcgtccagggtggcaaagcccgactggttcacgtcaatgaacaggttcgtgaatatattcgcaatgctgaacgtccagaaggtcagggagaagcgcctgccctttctggtgatgcgccgcttgaagtattgctggtgacactggcgaaagagatgacgccagttgaacaaaaacagtttacatccttgcttctgcgggaagggattatcggattgttacaacgcttagggattcgcgatagcaaataatatgaaaagattacgcaataaaatgaccaccgaagaactggctgaatgcctcggtgtggctaaacaaactgttaaccgttggatcagagaaaaaggctggaaaacggaaaaatttcccggcgtgaaaggcggtcgtgccagacttattctggtcgatacgcaagtttgcgagtttattcagaacacgccagccttccataacacaccaatgttgatggaagctgaagagagaattgctgaatacgctcctggagcacgcgccccggcgtatcgacaaatcatcaacgcgatagataatatgacagacattgagcaggaaaaagtcgcgcaatttttgagtcgtgaaggaattcgcaatttcctcgcccgtctcgatattgacgaaagtgcataaataaaaaacggcaggatattatctcctgccgtttatctttttacacgctaattactgctgattttcgcgttcagcaataaaatccagcgctttgttgatacgctcgatactgcgggtcttaccaattgcgtgaacggtaacatccagtgctggagactgccccgcaccggttacggcgacacgcagcggcataccaactttacccatacccacttccagctcatccgccgtcgcctgaatagcgtgatgaacgttttcagcggtccagtcagtaatcgcggccagtttgtcacgaaccacttccagcggctgacgcgctaccggacgcagatgttttttcgcggcgtcggcatcgaactcagcaaaatcttcgtagaaataacggcagctctgtgccatctctttcagcgtcttgcagcgttcgcccagcagtttcaccagatcagccagctgcgggccgttacgggtatcgatattttcctgctcaatgtgccactgtaagtgagtagcaacatactccggcggcagcgcgttaatgtagtgatggttcagccacagcagcttgtcggtgttgaacgcactggcagatttgctgacggcattcaaagtgaagtatttgatcatctcttcacgagtgaagatttcctgatcgccgtgggaccagcccagacgcaccagatagttcagcagtgcttctggcaaataaccgtcatcacgatactgcattacgctgactgccccgtgacgtttggacagttttttaccgtcatcgccattgatcatagaaacgtgcgcgtaaaccggcaccggcgctttcagggccttaagaatgttgatctggcgtggcgtgttgttgatatggtcttcgccacggataacgtgggtgatttccatatcccagtcatcgacaaccacacagaagttataggttggggaaccatcggtacggcggataataagatcgtccagttcctggttgctgaactcgatcggaccacggatctgatcgtcaaaaacaacagaaccttcctgcgggttagcaaaacgtacaacacacggttcatcatcagcatgatgctcatggctgtggcggcagcgaccgtcataacgcggcttctcacctttcgccatttgctcttcgcgcagcgcttccaggcgctctttagagcaatagcatttataagcagtgccctcttccagcatctgatcgatcaccgcgttgtagcgatcaaaacgtttggtctggtagtacggaccttcatcccactccaggctcagccagttcatgccatccataatggcttcgatagcttccggcgtggaacgctcaagatcggtgtcttcaatacgcagcacgaactcaccgccgtggttacgtgcaaaaagccaggagtaaagagcagtacgcgcgccgccaacgtgcagatagcctgttgggcttggcgcgaagcgagttttgattttcatgaaatggccttacgtttagaaagatgccgacaaccggcaaatcctggaaaaattaagtgggcgatattctatcactcccgcctgattcctcaatgtagttcgggtttctaccttacgcattattgttttcgttgacaaattgcgcaacacggtctgttttgcgatcatcttgcttaaatttacgacgaacgaacaatttctttagaaaatgcgttgactcattttgaactctccctataatgcgactccacacagcgggggtgattagctcagctgggagagcacctcccttacaaggagggggtcggcggttcgatcccgtcatcacccaccaactactttatgtagtctccgccgtgtagcaagaaattgagaagtgggtgattagctcagctgggagagcacctcccttacaaggagggggtcggcggttcgatcccgtcatcacccaccactttctcgccagctaaatttcttgtaaaaatgtgaagtaccgaagtgggtgattagctcagctgggagagcacctcccttacaaggagggggtcggcggttcgatcccgtcatcacccaccacttcgggtcgttagctcagttggtagagcagttgacttttaatcaattggtcgcaggttcgaatcctgcacgacccaccaatgtaaaaaagcgccctaaaggcgcttttttactatctgcgatactcaaagattcgaacctgcagcaggtttgagttgagcgcagcgaaacaacggagccgctcgtgctggcgacggcccgaagggcgagcgaagcgagtcatcctgcacgacccaccaatgtaaaaaagcgccctaaaggcgcttttttgctatctgcgatttgcgaaattgcctgatgcgcttcacttagcagactactatttccggcaattcctgtctcctcacttactgtgtcaatgcagccaacagcttaaccatcgcgggcgtcacctgctgtgtttcataaacaatatataaatctgcagggatgcgctgtttgagcggacggaaaatgacacctggccagttcatttgtgcgtagctgtccgctatcaatgtgataccaatgcccatactgaccatagcgagtaccgtttgcggttcattaacttcgcgaataacaaccggactaaatcccacctgctggcaaactcgctgcaaaaaatcccagtcagtgtaaacgggcggcattgtaacaaaatactcgtcacgtagcgcttccagcgggacggtggaaaaactactgagatgatgctcttcaggcatcgccaccagaaacgcgctttcatgcaaccgtaagctggtaaaaccagtcggtggttctgtcgccattcgccagatcccggcatcaagttcgcggcgttccagcaaggccatttgcatcgcgggcatcttttcgcgaaaaagaacgtcaacgttaggattttccctgaggaatcgccgcataaccgggcgcatccgtccccacattgccgttcccactacgccgagttcaatccgccctgcttctccccgacctatttgttcaatccgagccaatacattattagcattcaccagcaatcgacggctttcttccatcaagattttgcccgcgtgtgtcagtacgacgctgcggctatggcgaataaaaagctgcgtgccgagttgattttccagctctttaatatgaatgctgagcggaggctgagacatatttaaacgcgctgctgcgcggccaaaatgcaactcttccgctacggcaagaaaataacggagcaacttaagatctgttctgtatacgcgttccataattaagtgctccatataataaatacatcgtattaaattatcatggcataaagtatttcaccaccagatatccgacatacataaacacaatggataatatacccggtaatacatttggtacaggaataggcaagcgcacgattgtaaacaaagcaccaataccaaaaccaacgccggaagaaaataaaatatctttcactaattaacctttatcataaaagcagctctgaagagcagagccgcgaatccttttaatgagtcaccgctcgatgctttatcttttcagggtcatgattatatttaaacccaaagaaaaatatcactgcgagaaaaagagcatatcctgcaaacaccagccagatagtttgccagtcttttacgccatccacgctaaagtaatctactgccatgccactcagaatgctgccaacccatgcgccgacaccatttaccatggtcataaagagcccctgcgcgctggcacgaatgctggaatcaacttcctgttcgacaaatacgctaccagaaatattgaagaaatcgaatgcacagccataaacaatcatgctcagcagcagcaaaataaatccggttgtactcggatcgccataggcgaagaagccaaagcgcagcgtccaggccaccatactcatcagcatgacggttttaatgccaaatcgctttaaaaagaatgggatagtcagtataaagcccacttctgccatctgactaacactcagtaaaatggagggatatttcaccacaaaactgtcagcaaactccgggttacgggcgaaatcatgtaggaacggattaccaaaaacgttggtaatttgcagtaccgcacccagcatcatggcaaagaggaaaaagatggccatgcgtggatttttaaacagcacgaaggcatccagacccagcttgctggcaaggcttgtggtcgcttttttctccgcaaccggaatcttcggcaaagtcagcgcataagcgctcagcagcaaactcgcaccggacgcgatatacagctgcagactactcaattccagatgcagcaggcttactgcccacatcgcgacaatgaaccccaccgtaccaaaaacgcgaatgggcgggaaagcggtcaccgggtcaagccctgcctgggcaagacaggaataagagacgctgttgcttaacgcaatagtcggcataaacgccatcgcattgactaacatcacccaaaacatcatatccggatcagttacggatgccgcataaaaaagtacgcccgcacacaccaggtgacacagcatgtatgcacgttctgcgcgcagccatttgtctgcgatgatccccattataccaggcataataatcgcggcgatccctttggaactgtaaaccatgccaacattagcgccggtgaaatgaagagtattaatcatgtaagagccgagggtaaccagccagctcccccagataaaatattgcaaaaaggacattacctttaagcgcatcgcgatgctcataatcgtttccttgtcgcatcatttggcctcacccgcgaggccgtttcttattgtttttctcaggcaattttgcgcagaaagccacaaataaggttgatgaagttctgcttagagagctccgcagccgccagcgtttgcgcatgactcaatttcacatcgcttaaaccttccgccatattggtaatcgcagagaccgcaacgactttaaggtcgcaatggcgagcactaataacctcaggcaccacagacataccaacaacatccccaccaataatttgcatcatgcgaatttccgccgcagtctcgaaattcggccccggatagctgacgaacacgccctccgtcagagggaaaccctcttctttcgccactttttgtaacagtgcgcggtattccgcatcgtaggcatttgccagactgaagaagcgctctccaaaacgatcatcgttaagacccaccatcggcgtaccgggcatggtgttgatatgatctttcaatgcgaccaggctgcctgcccccacttccggacgcaggctgcctgccgcattggtgcagaacagtagctcgcagcccagcagcttaaaggtacgaattgcgtcagtcataatggtcattccacgaccttcgtagaaatgtccgcgacctttcatacataccaccggtacgccctggagatggcccagcactaactcccccgcatgaccatgtaccgtacttaccgggaagcccggcagcttttcgtaggaaattgcgacagcgttctcaatctgatcggccagcgcgccgagcccggaacctaaaataaaggccactcgtggcgtgaaatcaggtttataagtcttgataatatctatgcaaaacagcgggttatgagaaaattgaacctgagacatacatatcctttttctgtagggtggaatctaacgcctttttatagcgaggttgtcccggctcttaccaatacacttttctcacgcattcaatagcgattcgatatcgatggatttatatcttttctctattaatccacggtaaaaactgtattggcgatattaattcctttgcattaacaatatgtcgtttttagcaaaccactttattaagcaatctactaataacgatcggcatagggaattatgctatgaaaaaacatcttttaactctgacactttcctctatattagcgatacctgttgtatctcatgcagaatttaaaggcggttttgcagatatcggcgtgcattatctggactggaccagccggactaccgaaaaaagcagcaccaaaagtcacaaagatgattttggttatcttgaatttgaaggtggcgctaactttagttggggagaaatgtacgggttcttcgactgggaaaacttctataacggtcgccataataaaccaggtagcgagcagcgttatacctttaaaaataccaaccgtatttacctgggtgacaccggatttaatctctacttgcatgcgtatggcacctacggttctgcgaatcgcgtgaatttccacgacgatatgttcctgtacggtatcggctacaatttcaccggcagcggttggtggttcaaaccgttctttgctaagcgttatacagatcaaacctattacactggcgacaacggctatgtcgccggctgggttgcaggttacaactttatgctgggcagcgagaaattcactcttaccaactggaacgagtacgagtttgaccgtgacgctacctatgcagcgggtaatggcggtaaagaagggctgaatggcgcagttgcactgtggtggaatgcaacaagtcacattactacggggattcagtatcgatatgcggatgacaaactgggcgaagatttttaccaggatgcgataatctactccatcaaatttaacttctgattgattactgccggggctcccggcagtatgaattcactttatatctgatacaacggatccccttcccgcccagccattagcgcattgccctggtctcgtaccacgtcccataaagcttcagcggcggtggaaagactacggttcttcctgcgcaccagcatcaactggcgttcaacaaccggcgtaatgcgctttaccaccagtgggctaccttcaggcaatggtagcgccagtgcgggaagaatactgatgccgatgcctgcggctaccatcgggaacagcgtcgccggatgtccaatctcctgcacaatattcgcctgaataccattgcgcgccagcgctgcgtcaatcagcggtcggctgccactcgcgtaatcctgcaacaccaatttcgctccctgtaatgcctgccagggtacataatcttccacggccaaagcgctatcgcgatggcaaagcagaaagaaaggctcggaaagaatcgcttcacattgcagatcgcccactgggcctggatcgatgacgatgccaaaatcgacatctccctggcgaatactttccattacccactgctgcggacgatcgtgcaggacaaactgaatatctggatagcggcgatggctttcagcaatgcattgcggaataagatgcgcggaaatggtctggctggcagcgacccgaacttttccgctcagttgttgccccatacgcccggtatcgcgcaacgtgctgttcagttcatccagcagtcgctcaagacgcaaagccagctgctgccctgcatctgtaagcaccacttcacgcgtggttctgtccagcaggcgaacaccagtatgattttccagttccttcacactgtgactcactgcgctctggctcaggccgatacgctctcctgcacgactaaaacttttctcctgcgctactgtgacgaaaacctttaattgttttaaagaataattcatctgttttcttcatgaatggatgcaataaatcaattttatttctcaaactggaagaagcacaatagaaccatcgatcatctggagtctttatgaaactttttcgtatcctcgatcctttcaccttaaccctgatcacggtggtgttgctggcctctttctttccggccagaggcgatttcgtccccttctttgaaaatctgaccaccgcagctattgccctgctgttctttatgcacggcgcgaagttgagccgtgaggcgattattgctggcggtggtcactggcgactgcatttgtgggtaatgtgcagcaccttcgtgctgtttccgattctgggtgtactgtttgcctggtggaaaccggtaaatgtcgacccgatgctctactccggttttctctacttgtgcattctcccggctaccgtgcagtctgcaatcgccttcacgagtatggcgggcggtaacgtcgcggcagcggtttgttctgcgagcgcatccagcctgctggggattttccttagtccattgctggttggtctggtgatgaatgttcacggtgcagggggcagccttgagcaggtcggtaaaattatgctgcaactgctgctgccgtttgtgttggggcatctttcccggccgtggattggtgactgggtgagccgcaataaaaaatggattgcgaaaactgaccagacgtccattctgttggtggtttatacagcgttcagcgaagccgtcgttaatggtatctggcataaagttggctggggaagtttgctgtttatcgtggtggtcagctgcgttcttctggctatcgtgattgtagttaacgtctttatggcacgccgactgagcttcaataaggcagatgaaattactatcgtcttttgtggtagcaaaaagagtctggcaaatggcatcccgatggcaaacattctgttccccacaagcgtgatcggtatgatggtgctgcccctgatgattttccatcagatccaattgatggtctgtgcggtgctggcgcgtcgatacaaacgccagaccgaacagttacaggcgcagcaggaaagcagcgccgataaagcttaaagcggacgcttcaggggctggaccagttgcgtcagcccctcggttttaatcagcagcgtgatttgcattagctcaccgagcttccctgccgggaactcatctttgcgggcaaaccacagcagatactcctccggcaggtcgattaagcgacgccctttgtatttgccaaacggcattatcgtattggctatttcaatcagctgctctttttccatctcagctacccagcaaacgcagcatttccgcttcgtcgatgacttcaatgcccagttcctgcgccttcgccagtttagatcctgcagcttcacccgctatcaccagatcggttttcttgctcacgctgcccgcgactttcgcgcccagttcgaccagtcgagctttagcgtcatcacggctcatctggcttaagctgcccgtaagcaccacggttttaccagcaaacgggctgtcaatctcttccgcgttgataacgatcggcgcaggccagtgaacaccttccgccaacagctcgctgatgacattgcggttgctttcttcggcaaagaagttgtgaacgtgggatgcaacgacaatgccaacatcaggcaccttttgcagctcttcaatgctagcggcttccagcgcttccagcgtgccgaaatatgccgccagacctgctgcggtggcctcgccgacttcacggatgccaagtgcatagaggaagcgagcaaaggtggtttctttcgctttttccagcgcgttaaccacgttttgtgcgctttttggccccatacgctccagtccggtcagtttgcctgcggtgagtttgaacagatctgccggagtatggacatattctttttcaaccagctgatcgatgattttgtcgcccattccgtcaacatccatcgcacggcgggaaacaaagtgtttcaggctctctttacgctgcgcaccgcaaatcaggccaccggtacagcgggcaaccgcttcaccttccacacgctcaacgtcagaaccacataccggacaatgcgtcgggaatacaacctcacgggtatcttccgggcgttcagaaagcacgacgttaaccacctgcgggatcacgtcgccagcgcggcgaatcaccactttatcgccaatgcgtaaaccaagacgttcgatttcatccgcattgtgtaaggttgcgttactcaccagcacgcctgcaacatggacaggttccagacgcgcaacaggcgtaatcgcgccagtacgcccaacctgaaactcgacgtcacgcacaaaggtcatctgctcctgcgccgggaatttaaacgctaccgcccagcgcggggcacgcgcgacaaagccaagctgctcctgctgtgccagactgttgaccttaatcaccacgccgtcgatatcaaagcccagcgtcgggcggtcttcttccactttgtgatagaacgccagcacttcttccgcgctttcacaaagcgttacccgatcgctgaccggcaacccccactttttaaattgcagtaaacggccaagatgagtatccggcagctcgccaccttccagaacaccaacgccatagcagaaaaaagtgagcggtcgcttcgctgtaatacgcggatcaagctgacgcagactaccagctgccgcattacgtgggttagcaaacactttcccgcccgtgcgtcgcgcatcttcgttaatcttttcgaaccccgcctgcggcaggaacacttcaccacgcacttccagacgcgccgggatattctctccgtgcagcttcagcggaatggcgcgaatagtacgcacattagacgtgatatcttccccggtggtgccatcgccacgggtcgcggcactgactaaaacgccattttcatacagaatactgacggcaagaccatccagcttcagctcacagcaccaggtgactttctcgttgtttttcagacggtcctgcacacgtttgttgaaagcaagaaagctttcttcatcaaaaacgttatccagactcagcattggtacttcatggcgtatctggctgaaagccgccagcggcgcagcgcctacacgttgagtagggctatcaggcgtaatcagttctggatgtttggtttccagctcgcgcagttcgcgcatcagcctgtcgtattcagcgtcgggaatttccggcgcatccatcacatgataaagatattcatgatggcgaagcgtcgttcgcagttctgtcagttgttgttcgatactttccatatcgcaccatcaatgctaaaaacccccgacaagcgggggttcgaagaggagttaatttgccttaagtgtatcaggcgttggcgtctttgacttcgcggatgatgtcctggtactcgcgcaatttctgcggagtcatcatacggcgctgatcgtcaagcacgacaccgcccacttcatcggcaatatgctgcgcagattgcagcatcagcttgaagttctgcagctcgtcaccgtaagacggtacctgcataaagatagtgacacccggagtagtgaaatccttcatttcaggatcaaaggttcccggtttcaccatattcgccaggctgaataacgccgggccgctgccatccgggctaagatgacgatggtaaatattcatatcgccaaaaatgaagcccgcttgttgaatgctgttaagaagcagttcaccgtttagctcgctaccgtgatgcgccgcgacgttcatgataatcaccgcttctttgcgcttcggtttatccataactggagcaggttccgctacaggctcaggctgtggtgccgctacgggttctgcaggctggaaagcctgttgtgccggttgcggtgcactatgcacaggctgcggcgctggcgcgacctgtgggctaactggctgctgcaacggctgttcaggctgcggctgataggcaggctgctgcaccggctgcgctggatgcggagcatgttgcggcggtacctgcgcttcaggcggctgctggaccggttgacgcggctgcgcagacgcataaggcggttggtactggtgttgcgggctcggacgagcagcctcatgctcctgagcgttagccggggcatgattcacgcggtgaacacgaacctcaccaacgccctcatcatcttcgacatcctcgtcataagaatcgtcgtcacgtttactcttcattcgttttaatggccgatcgcggaacatagaagatcgttctttacggctggtccagaaaccatgtaccagtaaagcgattatggcgatcgcgccaacaatgattaatatcagacgcaaatcctgcatcattatattctctgttgttctaacaccttgccaccacggcaaacatttactcactaagagtatttgccgattacctcaagtgcaagtgcactattaactttcacagcacaaagatagatgaaatcgtgctttttgctgttttttcgaacatatcctaactgtccattgcgcaattacccggtaaaatacgcagaattttcctgggattggtcaaaaggagctcatcctgattatggttagtagtttcacatctgccccacgcagcggtttttactattttgcgcaaggctggaagctcgtcagccaacctgggattcggcgtttcgttattttaccgctgctggtcaatattttgttgatggggggcgcattctggtggctctttacacagctcgatgtctggatcccgactctcatgagttacgttccggactggctacaatggctgagttatctgttgtggcctctggctgtcatctctgtgctgttagtgtttggctatttcttctccacgattgctaactggattgccgctccgtttaacggtttattggctgaacaactggaagcacgattgactggcgctacaccgccagataccgggattttcggtatcatgaaagatgtgccgcgaatcatgaaacgcgaatggcaaaaatttgcctggtatctgccgcgcgcaattgtattactaattctttacttcatccctggtattgggcaaaccgtcgcgccggtactgtggttcctgtttagcgcctggatgttagccatccagtattgcgattaccccttcgataaccacaaagtgccgtttaaagagatgcgcaccgccctgcgcacacgcaaaatcaccaatatgcagtttggtgctttaaccagcctgtttacgatgatcccgctgcttaatctgttcatcatgcccgttgccgtttgtggcgcgacggcgatgtgggtcgattgctatcgcgataaacacgcgatgtggcggtaacaatctaccggttattttgtaaaccgtttgtgtgaaacaggggtggcttatgccgccccttattccatcttgcatgtcattatttcccttctgtatatagatatgctaaatccttacttccgcatattctctgagcgggtatgctacctgttgtatcccaatttcatacagttaaggacaggccatgagtaagatttttgaagataacagcctgactatcggtcacacgccgctggttcgcctgaatcgcatcggtaacggacgcattctggcgaaggtggaatctcgtaaccccagcttcagcgttaagtgccgtatcggtgccaacatgatttgggatgccgaaaagcgcggcgtgctgaaaccaggcgttgaactggttgaaccgaccagcggtaataccgggattgcactggcctatgtagctgccgctcgcggttacaaactcaccctgaccatgccagaaaccatgagtattgaacgccgcaagctgctgaaagcgttaggtgcaaacctggtgctgacggaaggtgctaaaggcatgaaaggcgcaatccaaaaagcagaagaaattgtcgccagcaatccagagaaatacctgctgctgcaacaattcagcaatccggcaaaccctgaaattcacgaaaagaccaccggtccggagatatgggaagataccgacggtcaggttgatgtatttattgctggcgttgggactggcggtacgctgactggcgtcagccgctacattaaaggcaccaaaggcaagaccgatcttatctctgtcgccgttgagccaaccgattctccagttatcgcccaggcgctggcaggtgaagagattaaacctggcccgcataaaattcagggtattggcgctggttttatcccggctaacctcgatctcaagctggtcgataaagtcattggcatcaccaatgaagaagcgatttctaccgcgcgtcgtctgatggaagaagaaggtattcttgcaggtatctcttctggagcagctgttgccgcggcgttgaaactacaagaagatgaaagctttaccaacaagaatattgtggttattctaccaagtagcggtgagcgttatttaagcaccgcattgtttgccgatctcttcactgagaaagaattgcaacagtaatgccagcttgttaaaaatgcgtaaaaaagcacctttttaggtgcttttttgtggcctgcttcaaactttcgcccctcctggcattgattcagcctgtcggaactggtatttaaccagactaattattttgatgcgcgaaattaatcgttacaggaaaagccaaagctgaatcgattttatgatttggttcaattcttcctttagcggcataatgtttaatgacgtacgaaacgtcagcggtcaacacccgccagcaatggactgtattgcgctcttcgtgcgtcgcgtctgttaaaaactggcgctaacaatacaggctaaagtcgaaccgccaggctagactttagttccacaacactaaacctataagttggggaaatacaatgttccagcaagaagttaccattaccgctccgaacggtctgcacacccgccctgctgcccagtttgtaaaagaagctaagggcttcacttctgaaattactgtgacttccaacggcaaaagcgccagcgcgaaaagcctgtttaaactgcagactctgggcctgactcaaggtaccgttgtgactatctccgcagaaggcgaagacgagcagaaagcggttgaacatctggttaaactgatggcggaactcgagtaatttcccgggttcttttaaaaatcagtcacaagtaaggtagggttatgattagtggcattttagcatccccgggtatcgctttcggtaaagctctgcttctgaaagaagacgaaattgtcattgaccggaaaaaaatttctgccgaccaggttgatcaggaagttgaacgttttctgagcggtcgtgccaaggcaagtgcccagctggaaacgatcaaaacgaaagctggtgaaacgttcggtgaagaaaaagaagccatctttgaagggcatattatgctgctcgaagatgaggagctggagcaggaaatcatagccctgattaaagataagcacatgacagctgacgcagctgctcatgaagttatcgaaggtcaggcttctgccctggaagagctggatgatgaatacctgaaagaacgtgcggctgacgtacgtgatatcggtaagcgcctgctgcgcaacatcctgggcctgaagattatcgacctgagcgccattcaggatgaagtcattctggttgccgctgacctgacgccgtccgaaaccgcacagctgaacctgaagaaggtgctgggtttcatcaccgacgcgggtggccgtacttcccacacctctatcatggcgcgttctctggaactacctgctatcgtgggtaccggtagcgtcacctctcaggtgaaaaatgacgactatctgattctggatgccgtaaataatcaggtttacgtcaatccaaccaacgaagttattgataaaatgcgcgctgttcaggagcaagtggcttctgaaaaagcagagcttgctaaactgaaagatctgccagctattacgctggacggtcaccaggtagaagtatgcgctaacattggtacggttcgtgacgttgaaggtgcagagcgtaacggcgctgaaggcgttggtctgtatcgtactgagttcctgttcatggaccgcgacgcactgcccactgaagaagaacagtttgctgcttacaaagcagtggctgaagcgtgtggcagccaagcggttatcgttcgtaccatggacatcggcggcgacaaagagctgccatacatgaacttcccgaaagaagagaacccgttcctcggctggcgcgctatccgtatcgcgatggatcgtagagagatcctgcgcgatcagctccgcgctatcctgcgtgccagcgctttcggtaaattgcgcattatgttcccgatgatcatctctgttgaagaagtgcgtgcactgcgcaaagagatcgaaatctacaaacaggaactgcgcgacgaaggtaaagcgtttgacgagagtattgaaatcggcgtaatggtggaaacaccggctgccgcaacaattgcacgtcatttagccaaagaagttgatttctttagtatcggcaccaatgatttaacgcagtacactctggcagttgaccgtggtaatgatatgattagtcacctttaccagccaatgagtccgtccgtgctgaacttgatcaagcaagttattgatgcttctcatgctgaaggcaaatggactggcatgtgtggtgagcttgctggcgatgaacgtgctacacttctgttgctggggatgggtctggacgaattctctatgagcgccatttctatcccgcgcattaagaagattatccgtaacacgaacttcgaagatgcgaaggtgttagcagagcaggctcttgctcaaccgacaacggacgagttaatgacgctggttaacaagttcattgaagaaaaaacaatctgctaatccacgagatgcggcccaatttactgcttaggagaagatcatgggtttgttcgataaactgaaatctctggtttccgacgacaagaaggataccggaactattgagatcattgctccgctctctggcgagatcgtcaatatcgaagacgtgccggatgtcgtttttgcggaaaaaatcgttggtgatggtattgctatcaaaccaacgggtaacaaaatggtcgcgccagtagacggcaccattggtaaaatctttgaaaccaaccacgcattctctatcgaatctgatagcggcgttgaactgttcgtccacttcggtatcgacaccgttgaactgaaaggcgaaggcttcaagcgtattgctgaagaaggtcagcgcgtgaaagttggcgatactgtcattgaatttgatctgccgctgctggaagagaaagccaagtctaccctgactccggttgttatctccaacatggacgaaatcaaagaactgatcaaactgtccggtagcgtaaccgtgggtgaaaccccggttatccgcatcaagaagtaattcttgccgcagtgaaaaatggcgcccatcggcgccatttttttatgcttccgccagcggcggcaaaatcaattcatcgctctcatgctgctgggtgtagcgcatcacttccagtacgcgcaaccccgctcggtgcactgcatcggttaacgccttccctttcagcaagccactgatgagctgagcacaaaacaggtcgccagtccctttcaggtcggtttttacccgactatgggaaatgacattcacgctgtcggcagtgaccaccacaacctgcatctcctgattttcttcattaccggaggcgctggtaaccaccacccattttaatgtgtcactaagcagactttttgcggcagcaatggcactgtcgagatcgcggcaatttttaccggtcaggatttccaactcaaagatattgggggtaattccctgcgccagcggcagtaaatattgtcgatacgcttcgggaaggtcaggtttgacataaattccgctatcaatatcgccaatcaccggatcgaccatgatcaataggtcaggatggtctttgcgtagcgcagtcagccactcggcaaggattttgatttggcttgccgttcccatatagcccgtggttacagcacgaagttggcgcagcgcatcacgctcctgaagcgcacgcaaatagccgctaaaccattcgtccggaatcgcaccaccgtagaaagtgtcataatgcggcgtattgctcagcaataccgtcggcacggcaaagacattcaggccgttctgtttgatagcaggcacggcaatgctgttgcccacgctgccgtaaaccacctggctctgcacggcgacgatatccgcctgcagtgccctactcttatcgttaaacaacaacaaactactcatttaattttttctccttgccgatgatcctcatcgtaatccaaccgaaactttacctgattctggcagtcaaatcggctatcacaaaacaaggataaggtaattcaatgaagaaaatcatttgtctggtcattacactactaatgacactccccgtttacgcgaagttaactgcccatgaagaagcccgcatcaacgccatgctggagggattagcacagaaaaaggatttgatatttgtgcgcaacggtgatgaacatacctgctatgaagcggtttctcatctgcgtctgaagctcggcaatacccgtaaccgcattgacactgccgagcagtttattgataaggttgctagcagcagtagcattactgggaagccgtatattgtgaagatccccggtaagagcgatgagaacgcacagccttttttacatgcgttaattgcgcagacggataaaacggtgcctgcggaaggaaattaatccgctttgggaaggcatttacaggaggtaacatgaaaaaacgctttatttatcacgatgaaaaaagcaataaattttggtggatagattacgaaggggatagtttagctgtcaactatggcaaggtaggtagtattggtaaattccagacaaaagagttcgataatgaagaacagtgtctgaaagaagccagtaaattgattgccgcaaaaatgaagaaaggctatcaagaagatccaaagtttaacttcatggatcgctactattttgatgatgaagaaattgggttacatgttaaaacgagtcacccaaacttccagtgccattttactgatccactttatatgtgttgctgggatgaagaatctccttttggcagcgatgaaggtgctgatgctctaaacgttcttgaaaatagcctccgtaaagagccggatctggactgtgctgatttccctcaaatgttaattgaaactatgtggggtatgaaatacatcgctatggacagtattcttgaagaggatgttcgtgcgcaattactagtcgatgaaatgagcactatccagagcaatatgattacctacgcaactgcattcggtcagattaaagtcatgggtaaaatctcccataaacttaaaaagatgggactcaatgcactagcgcgtcatcagcttaccgcaaaaattcttcaatggggtgacggtcaggacagtccaatacttcaaaaaatgattgatgaccttacggcgtttcctcacgaaaattaaatactgcatttgtcggcagcaacaactgttaaaaaagtgcgctttgtttatgccggatgcggcgtaaacgccttatccggcctacaaaatcgtgctaattcaatatattgcagaaaccttgtaggcctgataagcgtagcgcatcaggcagttttgcgtttgtcatcagtctccgatgctattaatccttaaatccccgccccctggctaaaatgctcttccccaaacaccccggtagaaaggtagcgatcgccacgatcgcagatgatcgccaccaccaccgcgtcagggttagcttttgccacccgcagtgctccggcaaccgcgccgccggagctgacgccacagaatattccttcccgcaccgccagttcgcgcatggtgttttccgcatcgcgctgatgaatatccagcacctcatccaccagagaagcgttgaaaatccccggcagatattccgtaggccagcggcgaatgccgggaatgctgctgccctcttccggttgcaggccgacaatggtcaccggtttggattgttcgcgcataaagcgactgacgccggtgatagtgccggtcgtccccatgctggagacaaaatgagtgatgcgcccgccggtttgctgccagatttccggcccagtggtggtgtaatgcgcataagggttatcgggattattgaactgatcgagcagctttccttcgccacgattcgccatctccagcgccagatcgcgcgcaccttccatgccctgctctttggtgacaagaatcagttccgcaccataagcacgcatcgccgcacggcgttcctggctcatgttgtcgggcatcagcaatttcatgcgatagcctttcagcgcggcaatcattgccagcgcaatgccggtgttaccactggtggcttcgattaagacatcacccggtttaatttccccgcgcttttccgcctcgacgatcatgctaagtgccgcacgatctttcacgctacctgccgggttattgccttccagttttaaccacacttcactgccgttatccggccccattcgctgcaacttcaccagaggcgtattgcctattgtttgttctaatgtactcacgatctctatccatacgtggtgttgcctgatgcgacgcttgcgcgtcttatcaggtctacaggttacaaaccttgccattaaaaagcccggatcgcgggaagcgcctccgggcgtttaacattcactcaacctatcaggcgctttgtgcgagagcaagttcctcatcgcgggtttcgatacgctcgtcgccgttatacagccgcgcatgttgcagaccaacgaataaacgctcgccacgctgcggggcatcgtcgccatgcatcacgaccgtcagcggttcgttgtaccaccccagcggctgcaccactaattgggtgtagtgacctttcgggctggcttccagtacctgtaccggcagcgggctatcgaggctggtacggcggctgatatccacttcccaagggcgcaggaagagatccaccggcccctgatacgcaggtgtgtagcccagcggccagcgatgcgcgccaacatggaactgcccgccgcgaatggttccctgcaggcggttcacttcgcccataaattcgagcacaaaacggatcgccggttcgcgccatacctgatccggcgcgtcagcctgttcaatattgccctggctcatcacaactacacgatcagctacttcggtcgcttcttcctgatcgtgggtcacaaaaacgctggtgaattttagttcttcatggagttgacgcagccagcgacgcagctctttacgcacctgcgcatccagcgcgccaaacggttcatcaagcagcagaatttgcggttccacagccagcgcgcgcgccagcgccacgcgctgtttctggccgccggaaagctgcgccggataacgatccgccagatgggcaagctggaccatttccagcaattttgtcactttcgctttgatggctgcggcattcgggcgctcgcgacgcggcagcaccgtcaggccaaaagcgatattgtcgaacaccgtcatatggcggaacagcgcgtaatgctggaacacgaaaccgactttacgatcacgtgcgtgcaggcggctcacgtcggtgccgtggaagcgaatatgcccgctggtttgatgctccagcccggcgataatgcgcagcagcgtggttttcccggaaccggacggccccagcaacgcgaccatctgaccactaggaatatccagactgatatcgttcagcacctgggtgcgaccaaagctcttcttaatattggcaatctcaatgctcatgatgttcctcctgctgtgcgcgtttttcctgattctccaggcgccactgcaacatactttttaaaaacagggtgataatcgccatcagcgttaacagcgccgcagcggtaaaggagccgacggtgttgtagtcctgctccagcaattcaatctgtaacggcaggctcagggtttcgccgcgaatgctgccggaaaccacgctcaccgcgccaaactcgccaattgcgcgggcgttggtcaacaccacgccataaagcagcgcccagcggatgttcggtaatgtgacgcgacggaacatctgccagccggacgcgccaagcaaaatcgccgcttcgtcttcctggctgccctggcttaacatcaccggcaccagttcgcgcaccacaaacggacacgtcacgaagatggtgaccagcaccattcccggccaggagaacataatttgcaggttatgctcgtcgagccaaccgccgagcgggccgttagagccgtagaacagcaaatacaccagaccggcaaccaccgggcttacggcaaacggaatgtccagtagcgtcagcagtaactggcgtccagggaagttaaagcgcgtcaccagccaggccagcagaatgccgaacaccaggtttaccggtacggcaatcagcgcgatcatcaccgtcagccagatggcgtgcagcatgtccggatcggccagattctgtaaaaccggcatcagccccttgctgaatgcctgcacgaagatgtaaatcatcggcaccagcaggatgaacgcgctaaccagcatcccgatgccaatcagaaaccatttgccccagttaatcgggcgcgcgtcataacgcttcaattgggtaacttccgccattaatgacctaccacacgccgaccaaagcgactttgcagagtgttaatactgaacagcagcagcagagatgccgcgaggatcacgctagcaatcgcgctcgctgccgggtaatcaaactcctgtaagcgcacaaaaatcatcaggctcgtcacttccgtcttccacgcgatatttccggcgataaaaatcaccgcgccaaattcaccaagactacgggtaaagctcagcgccacgcccgccaccagcgccggagaaagctccggcagcaccactttgcagaaactctgccagcgcgttgcaccaagcgtttccgccgcttcttcatattccgggcctaactcttccagcaccggctgcacggtacgcaccacaaacggaatgctggtaaaggccatagccaccgcaatccccagccatgtataggtgactttgatatcaaacttcgccagccattcaccgtaaaaaccgtttacggaaaagaggctggccagcgttaaaccggcgacagccgttggcagcgcaaagggtaaatccatcagcgcatcaagcagcgtgcggcctgggaagcgatagcgggttaggatccacgccatcagcagaccgaaaacgccgttaaaaatgcttgccacaaacgcgctcagcagcgttactttgtaggccgcgaccacctgcgggttggtgatcacctcccagtactgcgcccagctcatctgggccagttgcatcaccagcgcggagagcggcagcagcaaaatcaggcacacaaacagcagactggtgccgaggcttaaggtaaagcccggcagcacgcgtctggaggagacagcaaacatcagttacgccccgccgctaacagcttgtctaactcgccgccgctggtgaagtgggttttcatcacttccggccaggagccaaatttgtcttccacgcggaacagctcggtctgcgggaatttgtctttcagtttgtccatcacctccgggttattcacgcggtagtaatagtcggtgatgatggtttgcgcctgcgggctatagagccagttcagataggctttggcggctttttccgtaccgttggcctgcacgtttttatcaacccacgccaccgggaattccgccagaatgttggttttcggaatcaccacttcaaagccctgcgcttcatactgtttacggatgttgttcacttcgctttcgaagctaatcagcacatcgcccaggccgcgctcggcaaaagtggtggtcgcgccacgaccgccagtatcgaacacttcaacgtttttcaggaactgggtcataaactgttcggttttgcctttgtcaccaccgtcagctttatccgctgcgccccatgccgccagataggtataacgcgcgttaccgctcgttttcgggttcgggaaaatcagcttcacgtcggagcgcaccaggtcgttccaatcgtggatattcttcgggttacccttacgcaccaggaagcccatggtggagtagaacgggctgctattattcggcaggcggctctgccagtcggccgggatcagcttgcctttatcgtgcaggatttgtacgtcggtcacctggttataagtgacaacgtcggcttttaagccctgtaaaatcgccagcgcctgtttactactcccggcatgagattgttttatcgtcagtttgtcgccgccgttatcttttgcccattgttgctcaaacggcggattcagggcggcaaacagctcgcgggagacgtcataagaactgttcagcagttccgttgcctgtacatggcccgccagcagcagagaagcgaccagcgcgagactgttctttttcagtaagttaacggccattgcgcacccttataaatttaatgactttctaatagccatcatatttataacggacgtgaaaggagtaacggttttatataccgtttggtgatttggaagttgaaaagggaataagaacttggttcaacaggcgtaattgttgcagtcagtttggacacgaacagcgcggagaaaccggagcgtacacatagtacgtgaggatttcgagcactgcccggggccaaaatgacaaataaaatagcctggtgaacttagttcaagacgaaatcctccccacaaatgcagggaggaaacagaggtgaatcagataccgacgctaaccgtctccggcagtgtgctgccgccatcaatcacattctgtgtaccggttaaatagctggattcatcgcttgcgaggaaggccgccagttcgccgacttccagcggatcggcgaggcgacgcatcgggattgctttcgccatttcagtcagcacgctctctggatcttccgggttgctctggcgggcaatgctttccgccattggtgtgcgcacgtatcccgggcaaatggcgttaacgcgaataccagactgcgcgtactccaccgccaggctttttgtcaggccaacaatcgccgctttcgttaaggcgtacgccgtttcgccaggatcggccaccatatcaccagtgacactagacatcatcacaatgcgaccatctttgcgggcaatcatctccggcagcaccgccttcgtgacgttccatacgcctttaatattgatgtcaatatggaaatcgcgatcgtcatcgctcatatcgaggaaactgcccagacgacaaacgcctgcgttattcaccaggatatcaatgcgcccttctttttccttcgcgcgtttgatagctgcggctacgctcgccgggtcacgcacatcggcgacaaccgccgtacagcgatgaccacgaccacacagttcgtccgccagcttttcgatctcaggggagatatccagcaagattaggttcgcgccatgacgtgcaaaagttctggcaattccttcgccaattccctgcaatgcgcccgtaatcagtgctgtcttgcccgtgagtttacccattttaatgctctccttgttaatacagagcgttacactccattccctctgaaaatacaggataaacaaaatattgctgcggatcagctcactaattcaggaaaatctcaatccagtcgctgctttatgcatcatttcaggcgttgtgttagctcactgctgcgctgaatcattttcaaactctccacatcattgagttgcacaaggccaacaaacagtaaatcggtaacagaattttgcgccgtgcgggtagacatgctgctgctacgccattcggtttctccggaaacggtatcgagggtgaaatgcgccagccgccgcagcggagagtcagtcagagaagtaatggcaatcaccgttgccccctgctttcgtgccgcttctgcgcacaagacaatctcttttttactgccgctgtaagagatagcgatttgtacatcgccttttttcaacgcctgagaaacggtggcttgtacgtgcgtgtcggcttcgcaggccacgcgatagccaattttcatcagtttgaagctcagatcgcgccccaccagcgcgcttccgcccaggcccgttatctggataaacggtgctttactgatgacctcaatgattttttgcagccgcgcgtaatcgagcaacgcgcaggtttgctccagcgccagctctttttcgcgattcagtttgcgcgcgatcacttccaggctatcatcactggtaatgctactgtgcaggtgcagtgccgtggcattcgttttctcccggctggcactgtattcgcctattaacgccatacgcaattcagtaaatccttgcgcgccgagtttttgggcaaatttcactatgctgctctggctaatgccgagctgtttcgccatctgccgactagaaacggattgcagctcactcacgttggcctgcagaaagtcagcgattttttgctcgttttcggtgaattcactccccgcattgcttattttcgtcaggtacaacatcttccactctcctgggctggcagcataaattccgcttaagttcttatgacgctcttcacactctgcgagtgtagactcaatgattcctttaagcctgtcaattcgggatatatgattccatacatctgcaattatttgatcgtaaatagtaaggtcaccaccgatgcaatttgaaaagatgattactgaaggcagcaacaccgccagcgctgaaattgaccgcgtaagcacgctggaaatgtgccggattatcaacgatgaagataaaaccgtaccgcttgccgttgagcgcgtactgccggatatcgccgcggcgatcgatgttatccacgcccaggtaagcggcggcgggcgtctgatttacctcggtgcgggaacatccggtcgtctggggattctggatgccagcgaatgtccgcccacctacggcgtgaaaccgggtctggtggttggtttgattgctggcggcgaatatgccattcagcacgcggtggaaggcgcggaagatagccgggaaggcggtgttaatgatctgaaaaatattaatttaacggcacaggatgtggtggttggcattgctgccagcggtcgcacgccgtatgtgattgccggactggaatacgcacgccagctcggctgccgcacagtgggaatttcctgtaatccggggagcgccgttagtaccaccgctgagtttgccattacaccgattgtaggtgccgaagttgttaccggttctagccggatgaaagcaggtacagcgcagaaactggtgctcaatatgctttccaccgggctgatgattaaatccggcaaagtgttcggcaacctgatggtcgatgtggtcgccaccaacgaaaaactgcatgtgcgacaggtcaatattgttaaaaacgccaccggatgtagcgcagagcaagcggaagcggcgttaattgcttgcgagcgcaactgtaaaacggccattgtgatggtgctgaaaaatctcgatgccgcagaagctaaaaaacgcctggatcaacacggcggctttattcgtcaggttttagacaaggaataacccatggccaaagagatcagcagtgaacttctgaacaccattcttacccgtgtcggcggaccgggaaatatcgccagttgtggtaactgtatgacgcgcctgcgtctgggtgtacatgacagtagtctggttgatcccaatatcaaaacgctggaaggcgtgaagggcgtcattttgaccagcgaccaggtgcaggtcgtttttgggcctggtaaagcgcatcgtgccgcaaaagcgatgagcgagctgctgggagaagcaccggtacaggatgccgcagaaatcgccgcccagaacaaacgtcagttaaaagccaaacaaacctccggcgtgcaacaatttctcgccaaattcgccaccatcttcacgccgctgatccccggttttattgccgccggtctgctgctggggatagcgacgttaattgccacggtgatgcacgttccggcagatgctcagggaacactacccgatgcgctgaattttatgaaggtgttcagcaaaggtttgttcactttcctggtgattctggtgggctataacgccgcccaggcatttggcggcacgggcgtaaatggcgcaattatcgccgcgctctttttgctcggttataaccccgcagcgaccaccggttactacgccggttttcacgatttctttggtctgcccatcgatccgcgcggcaatattatcggcgtgctgattgccgcgtgggcctgcgcccgcattgaaggcatggtgcgccgctttatgccggacgatctcgacatgctgctgaccagcttaatcaccctgctgatcaccgctacgcttgcgtacctgatcattatgccgctgggtggctggttattcgaaggtatgagttggctgtttatgcacctgaacagtaatccgttcggttgtgcggttttagccgggctgttcctgatcgccgtggtatttggcgtgcatcagggctttattcctgtttacctcgcgttaatggacagccagggattcaacagcttatttcccatccttagtatggcaggcgcgggccaggtgggcgcggcgctggcactctactggcgggcgcaaccgcacagtgcgctacgcagtcaggtacgcggggcgattattcccggcctgctgggcgttggtgaaccgctgatttacggtgtcaccctgccccgcatgaagccgtttgttaccgcctgtttaggcggcgcggcgggcggtttgtttatcggcctgatagcctggtggggtctgccgatgggcttaaacagcgcctttgggccgtctggtctggtagcgctgccgctgatgacttccgcacaaggcatccttccggccatggcggtttatgctggcgggattctggtggcatgggtttgcgggtttattttcaccacgctctttggctgccgtaacgtcaatctggactgatatcatgaaacggacaatgctctatctttctctgctggctgttagttgtagcgtcagcgccgcaaaataccctgttctgacagaaagcagcccagagaaagcagggtttaacgtcgaacggcttaaccagatggatcgctggattagccagcaagttgatgtcggttatcccagcgtaaacctgctgatcattaaagataatcagattgtgtatcgcaaagcctggggagcggcgaaaaagtacgatggcagcgtgttgatggaacagcctgtcaaagccaccaccgggacgctgtatgacctggccagtaacaccaaaatgtacgccacgaacttcgccctgcaaaagctgatgagcgaaggcaaactgcatcctgacgatcggattgcgaaatatattccggggtttgccgatagtccaaatgacaccattaaaggcaaaaacaccctgcggatttctgacctgctgcatcacagcggcggtttcccggcagatccgcaatacccgaataaagcggtcgcgggcgcgttatattcccaggataaaggccagacgctggagatgatcaagcgcacgccgctggaatatcagcccggcagcaaacatatctacagcgatgtcgattatatgctgcttggatttatcgtcgagagcgttaccggtcagccgcttgaccgctatgttgaagagagcatttatcgcccgctcggcctgacacatacggtatttaacccgctgctgaaaggctttaaaccgcaacaaattgccgccacggaattgaacggcaatacccgcgatggcgtgatccatttcccgaatatccgcacctccactctctggggtcaggtgcacgatgaaaaagccttttatagcatgggcggcgtttccgggcacgcaggtttgttttccaataccggcgatattgcggtgttaatgcaaacgatgctgaacggcgggggctatggtgatgtgcagctgttcaatgcggaaacggtgaagatgttcaccaccagctctaaggaagatgccacttttggcctcggctggcgcgtgaatggtaatgccaccatgacgccgacgtttggcacgctggcaagcccgcaaacctacggtcacactggctggaccggaacggtgaccgttatcgatccggtgaatcatatgacgattgtgatgttaagcaacaagccacatagcccggttgccgatccgcaaaagaatcccaatatgttcgaaagcggtcagttgccgattgcaacttatggttgggtagttgatcaggtgtatgcggcgttaaagcagaagtaataaaaaggccagtcagtaatgttactggctggtctgagagtgctgacaaacgcaaaactgcctgatgcgctacgcttatcaggcctacgtggagcccacaatatattgaattagcacgatttcgtaggccggataaggcgttcacgccgcatccggcgtgtacaacgcgcacttggtcaacaatctgaggccagtcagtaatgttactgcctggcctttaatcaatgaatcagaaacgcttacagcgccatcaacttgtccaggctcggtgcgaaataatagccgccggttaccggtttggtgaaacgcaacatcgcatcacgcttaccatcggtatcgccaaacatgctcagcagttgctgctcaatgttatgcagacgcgcgcagtaggcgcagaagtacagaccgtgagtgccactggcagtgccgtacggcaggctctggcgaacaatcttcagccctttgccatcttctttcagatcaacgcgggtgaggtgagaggtttccggacgttcgtcgccgtcgatctcttcgttggcctctttggtgcgcccgatcaccatctcctgatcgtgaacgctcatccggttgagctgcttcaggttgtgttcccaacgctggacaaacacatagctgccgcccgcatccacgccgtctttgataaccgccacttcgcgacgcgtctcttcacccgccgggttttccgtaccgtcaacaaagccgctcaggtcacgctcttcaacccaacggaagccgtggatctcttctttcacttcaatgcagtcaccaaaggcttccatcgccgcctgggcgacagagaagtttacgtcgtgacgcagagaaagaatgtggatcaacacatcgaactgggtcgtcggcgcaaggcctttaccgtagcccggaaaatctttcagctcttctgccccaacgccgccgctcagagcgcgccaggtgttgttaccaaaggcaaccaccgcaccaagatgcgcgtccgggaatttcgcttcaaaagttgccagtttgtcggcaaatgttttactggccgcacgcagggcgtcaacttcccctttcacgttggcttcgatccaaatcgccgcgcggcaatgttctggcaaaatgccactctgaacctgagacattgttcctcctgaaaataataatgccacgcaatccgtggcattgttgagcgctattttacgtgttttttcgcggcggcggtttgttcagacgcaaattaacgccgccagataattttactgactttccagtttttcagggtatcgtcgctaggcattaacccttcaggaccacgccattccccgctgaactggtagctaatatgttgactgccttcggctttacattcgacggcacgattatcatcaccatcagctttttggcaattgccaaatgctttgctgtaaaggtcgctaaacggtgtaccgattttaacaccggtgtcagcaggaatatcgctatccagcacgtcaatgcgactgatcgtgccttgatcgccgttaatcaccatcgccacgttgtcgcccttcatcacttcaaaaaagcgcaccacgttgccgttcgcggttttcattccgctgcgcaggcgataatcgccatcaagcgcatcggcaatggcttgttcttgcagtggtgtggacgccgttaattcacccacgccctgctcgctcactttggtggagctcccaaaccagttccacgggttagcggcagaccagttaacactgctcatcgtggaacagccggtcagcatcaatggcatagcgcataacattaaacgcaggcttttcatgtcacttcctttggttattcaataacgttgcttggagtgcaaattcaccaaaaagtgccgttattcttttacttcataaaaacaagcgcgtaaacgtcgattggtcagcagccagattaacgccacaatatccgccactaccagcgccagaccgataccgctaacggattcaccgttcagccacagccacggttgccagcaaagtaaaaccacctgcgccaacagcaacagaaaatagagtacacgccaggtgcgaggaaacgtagcccgccgaccgctcaacaaaaacgccagcaccgccggaatgccaggaatcagccccagccagaaattatcgtgatcgggataaaacagatttagcagcgcagtaccctgctcgcggctcgcaccggcaatgacaaacagcacccaggttcgcgcctgaagcaatagcacaagccagaagagcaagggtaaacgcaggcgaccgtgcgcatcataatggacaggatgaaactcagtactcttcatcttcaatcaaacgcttacccagactcagcacgtcggcgtgttcatatcccaggcgttcatacattccgagcaccatgtcgttatcttccggcacattgatctgaattttcgggcagccacgagcaatcagctttttctccagccgattaagcaacgcattggcaatcccacgcccacgaaactctggatgcacgccaagataataagcagacccgcgatgcccgtcataaccgcccatcaccgttccgaccacgtcaccgtttacctcagcgaccaaaaacaaactgacgtcatggttcatcttacgctcgatgtccatttccggatcgttccacggacgcagcaagtcgcaacgctcccaaagggtgatgacctcttcgaaatcttcctggcgaaatacgcgtatctccatggtattcgttacctttttgcgggttaaaaggctgattatggcgtgaacggtcgaattagccaatatctgacgaaaatcggttgaaaaagtggcataatggggagttgtcaactattgaaatgaaaagtaaaacaattctcaacagcaaaccgtcgtaacggattacgcgatacgatataacatctggaactttattattacaactcaggccgtatgagcacttttaaaccactaaaaacactcactagccgccgccaggtgctgaaagccggtttggctgccctgacgttgagtggaatgagccaagccatcgccaaagacgaacttttaaaaaccagcaacggacacagcaagccgaaagccaaaaaatctggcggcaaacgtgtcgttgttctcgatccaggtcacggcggaattgataccggagcgatcggacgcaacggtagcaaagaaaaacatgtggtgctggcgattgctaaaaacgtccgttccattttgcgtaatcatgggattgatgcgcgtttaacgcgttctggcgatacgtttatcccactttacgatcgcgttgaaatcgcccataaacatggcgcagatctgtttatgagtattcatgccgatggctttaccaacccgaaagctgccggtgctagcgtatttgccctctctaaccgtggggcaagtagcgcaatggcgaaatacctgtctgaacgcgaaaaccgcgccgatgaagttgccggtaaaaaggcgactgacaaggatcacctattgcaacaagtgctgtttgatctggtgcaaacagataccattaaaaatagtctgacgctcggcagccatattctgaagaagattaagccggtgcataaactgcacagccgcaacaccgaacaagcggcatttgtggtgttgaaaagtccgagcgttcctagcgtgctggtggaaaccagctttatcaccaacccggaagaagaacggctgttaggcacggcggcgtttcgtcagaaaatcgccacagcgattgctgaaggcgtgatcagttatttccactggttcgacaaccagaaagcacatagcaaaaagcgataagttatgaaacccgacgcacaccaggttaaacagtttctgctcaaccttcaggatacgatttgtcagcagctgaccgccgtcgatggcgcagaatttgtcgaagatagttggcagcgcgaagctggcggcggcgggcgtagtcgggtgttgcgtaatggtggtgttttcgaacaggcaggcgtcaactttagccatgtccacggtgaggcgatgcctgcttccgccaccgctcatcgcccggaacttgccgggcgcagtttcgaggcgatgggcgttagtctggtagtgcatccgcataacccgtatgttcccaccagccacgcgaatgtgcggttttttattgccgaaaaaccgggtgccgatcccgtctggtggtttggcggtggcttcgacttaaccccattctatggttttgaagaagatgctattcactggcatcgcaccgcccgtgacctgtgcctgccatttggcgaagacgtttatccccgttacaaaaagtggtgcgacgaatacttctacctcaaacatcgcaacgaacagcgcggtattggcgggctgttctttgatgacctgaacacgccagatttcgaccgctgttttgcctttatgcaggcggtaggcaaaggctacaccgacgcttatttaccaattgtcgagcgacggaaagcgatggcctacggcgagcgcgagcgcaatttccagttatatcgtcgcggtcgttatgtcgagttcaatctggtctgggatcgcggcacgctgtttggcctgcaaactggcgggcgcaccgagtctatcctgatgagtatgccgccactggtacgctgggaatatgattatcagccaaaagatggcagcccagaagcggcgttaagtgagtttattaaggtcagggattgggtgtaactccctcacccccactcccgcatccgctgatgcagcgtcagactcggcttctcggaaaacagctgctggtaatccgtggcaaattgccccagatgccagaatccccactgcatggcggcgtcttttaccgtcatactttggctccacggacttatcagttcgcggcgtacggcgttcaggcgaatgcgtttcagccacgcgttcgggccaatgcctaaaatagcgtgaaacgcgttttgtagcgtgcggcggctgacatgcagttgattacacaaatccagcaccgtcaccggttcggacatgttttccagcacatattcacgggcgcgggaaagcaatcgacggtaactctgatgactgatgctttccgccgtcaccattggttgcgcttcttccagcatggcccccatcgccattagcaaattatcccccagcacttttcgcactgcaggctgatggagattttccggattctcgcaaaacgtcgccagcgcctgttggacaaagccccacagcgcggctttatgctgctctttcacttccagcgcgctctggttacgcaacatatgtaatacccgatccgggttatgcaaaaagttagcctgccgggtgatgacatcttcagaaagcaccacgcccaggatcgtgtaatcatccggcgtgctcagttcaaattcagtgccaccagggcgggtggcgatttccgcgcttcccagacattggctaccgataaatccctgctcaccgcgcgtcgccggaatgccaaaccagaagctgttcggccagaccaggcagctctgacgcagcgccagaccggtgtattcacgaaaaacctgaatatcatcgagtagaatttccgtaaattcaccatgaaacttgcccggatgcagctgatcgtaaatctgctgccaggcggtaatcgttaaagcatgttcatagacatccgttgtctgtcgttgatgaacattatccacttcgaccttcggcgtgagcttcaggttttcgggtaagggttcatgataaagatggtgcaaattggctgtacgggtctttttcatgatgttaatgccgggtgttgtaggacacccggcacctccgacaggttaatggggcttgagacgataacgactactgcgtttacgtaacgtcccggcagaaaagagctgttcgagcgcatttctggctttttccagcggccagccaaagtgggcagccacttctcctgccgtcattccctgacgtacacttgttaacagcgccaacaactcgtcagcagattccgcgacgataactggcgcgtcgggttcccttacgggttgcttcggctggcggttaaagccagtaaccagccactgggtgtcatcgtctggccgaccgatctccttgcggctgatgacacgcccggtacgcatcgcggcagcacaacctgcgtccagcgccgcacgacacgccgccagatcgccttccaccaccagcgttaagcgaccagggtcaagcacttcgtgactgagcagacgaacgttagctgctttgagcatggcatccgctgcatctatcgcggcgaccatgccgtccacttccagcaatcccagtgcattgatcatcggcaacctccgttacgcacgctggattggattacgcgcgatttccagcactgcatcggtaaaggcgttacaggctgctttacacgctgcctggctaccggttaaaaatgctgcgctgtagttggtttcagacggtggcgggacataggtcgccagctgtacgtcggcagacttcagggctgcatcaatgccataggtcgcttccagcggcggtgccaccagatacgccatcggatcgccaagcgtgatcccggcggtactactgagataagaaccggtacggctaactacatgtgccaggaatgccgtatcttgcgcgtcattagcccactggaaagctgcgccattttcaatatgcgcaatcatcgcatccagacctgcacgcacttccgccgggtttggcccaccaagcataatcagcacttcaccggcagtcggactcgggccgtgtgcagcgcccgcatataggctgcggccatacaccacttccaccatcgcctgcttggtcgcttcatcagcggcaatgtaggtgacgtcatcggagtcggcagaaatcagaccgaggctacgaatatgcggcggcaatttcagttcacgcgcaaaatcggcgttaacggaggcaatcacccgcatagcggtgacagacggtcgaatcaaatctaaagctggcatgatgcctccttatcgggtcatgttgatgccggatgctttctgctccagcatacgtttcgccaaatccacaatgacggctgcggcttcaaccggcggcgtgccgccctggtgaatgttagagatacaggtgcgatcggcctcaacggtggtcgccatacgcgggctgtaaacggcgtagcaggagaggctttcactctgacccaaccccggacgttcgcccaccagcaggatcactactttcgcgccgaggatctcaccgatctgatcttcaatcttcacgcgaccataacgaacaaagaatggtgtaccgactttcagcccggcctgtttcaggcccgccatcagcggtggcaggatctcttcgtagttcacggtgatcgcatcagtactcaggccatcagaaataacgacctgtacgtccggattggcaacacactgcgctttcagcgcttcaacagcttctgcacacaggcggcggcccatatccgggcgagtcaggtagagatttttgtcgctaatttcagagcgtacttccagcaagccctgcgctttcacccactcttccggcacttctttcagtacggtatctttgctacgagagtgatcggccaggaaacgcagcagcgcctgcgtacgtggacgcggaccggcacgaccggtacaaacgcgggccacggtgctgcggcgcagttctgttaatacgtctgcgcgatgcggattttcaacaccaatccacgcttttgcttcagcggaacctaaatccagcgcacagctttcgctggtcaccggtgccgcacagttggtggtggcgcactttgcttcactcggcgcgggggccgcttgtcccatactcgccatcacgctgcgtacaatttcttcaatctgtttttgatccatgatatgttatctccgcgtcatcagaagaacagactcggatcgcccgcccgtttggtcaggcgaccgtttgccataatgcccatgctttccagccagcgttcaaactccggactcgggcgcaggttgagtaactgacgcacagtggcggtatcgtggaatgcggtggtctggtagttgagcatgatgtcatcacccagcggcatccccatgatgtagttgcagcctgcggtggcgagcaggatcatcaggttttcgttgaggttctggtcagcgtcagcgtggttggtataacagcagtcacagcccatagagatgccgctcagcttgcccataaagtgatcttctaagccagcacggataatctggcggtcgttgtagagatactccggcccaataaagccgaccacggtgttgacgataaacggatcgtaatgacgcgccagcccgtagttacgtgcttccatcgttacctggtctgcgccgaagttagcgccagcggatagcgcagagccttgtccggtttcgaagtagaggcagttttccccggcgatacggttgaactccgcgcccactgcgcgcgcttcgtcgagcatcgccagctccacgccaaactctttcagccctttttcgctgccacagatactctggaaaatcagcccgcccggtgcgccacgacggatcgcttcgatctgggtggtgacgtgcgccagtacacagccctgagttgggatgttgaatttgtcgatcacgccatagatggtatccaacacgcggcttaagttttccacgtcgtcagtcaccgggttaacgccgatcaccgcatcgcccaccccgaaggaaagcccttcgtagatttgcgcggcgatactttgcacgtcgtcacgggtgtcatttggctgcaaacgggcgctaaaggtgcccggaataccgatggtggtattggcctttttgattaccggcattttcttcgcgccgtagatcaggtccgcgttggagcaaatcttcgctaccgccgcgaccacttcgctggtcagccctttgcgggtaaaggcaatgtcgtccacgctggtttcatcgctcagcacatactcacgcagttcgctgatgctccagtttttaatctggttgtaggccgtttcgttaacatcgtcctgaatcagccgcgtcacgcagtcatcttcataggcaatcaccggattattgcggatgtccgctacggtcatttcgctcaacacctgctttgccgccacgcgctcctgactgcttgccgctgcgacgcccgccagcacatccccgctacgcagttcgttggctttagccagcacctcttttacatccttaaactgatatacattgccgaacaatgtggtctttagtttcataagtcgttccctcaggaaggaaatgcgagacttttcaccgtcaccggcacaacgcttccgccaaaaagaggcgtaccaatgtcgatatagtcccccgcgcggacaatcacttcgtcaatgactgccaacgggagttgttgtagctgtgggcgcaacaacatgcccagagctttaccaaagtcctgcccggccaccaccagcaggggatgcggattcggaaaacgcgcgacgaaatcgaccaacgcgttgatgaccgtcagtaccgcggcgtaacgcacaggcaggctggcgggaagcgccagcacgtacgcgtcagttttgggatcaagatccagctgaatcagcgcctgttgccaggcccccaccagatccgtttcatcaatcgggatcgccaccggcaaattgcgcagcggcagttgtacgccctcaagccagattgtgctgccagagaggctaagggtatgcgcgcccgcgccaatcaccgtggcgcgcacggtttgcgccggaaactgtacgttcatctcacgcaggcgcggatggtcatgcagcgcagttgccagcagcgggccaatatcggcaaaacagaacgggtcggcgggctggtggcgataacattcgcccacgccgccagaaagcgtaatgatttcgggcgtaacacctgcgggcagcaaaccggtttgcatcaatgcctgcgcgagcggactgagcgttccgtcaatcacttcgacaatcagttctgccatccgccgggtcacctgcaccagctgcgcgccggtcaggctacgggcgtcggtgcctgcaccgaagcactcatccacaatcatctgccccggtttatgagcgtaaaccacgcgcccgtggctgtcggtttccagcaggcgaccaccgacgttgaggcaggcagtgccgctgatttttccggcatcgaacagggcgtagttcgcggtgccaccgccgatgtcgatattcagtacccgacacagccgttgttcagaaagggtttgtgccccggctccgtgaccggcgatcacggattcgaggtgcggcccggcgctggcaacgacaaaatcgcccaggctctgagagagcgccatcaccgccgggcgagcattgcgggttttcgcgctttcaccggtgatgatgatggcaccagaatcaacgctttccggctcaatacccgcagcatgatattgctcgagtattaaggttttcagttccgcttcttttaaaccgccctgtttatcgacaggggtaaagaacaccggactttgccagctaatttcgcgtttaatgaattcgtagcgcggcacctggctcaccgccgcacggttaaccagctccagccgggagaaaatcacctgggtggtggtggtgccgatatcgataccgacgctcaatagctggcgagtgttcacgattgtgcctccgcttcggtttaagtcagctttgtgcctccgcttcggttttagtcgcggtcgcgtcttcttttggcaccagcatcatcgccacgccaatcgccgttacgccgccgatcaacttgccgacaatcatcgggaagatcatggcgttcatgttggcagcggcgaagcctaagtggtcgcccagggcgaaagcagcggaaacggcgaaggcgcagttgatgactttgccgcgggtatccatctgcttcatcatgccgaacatcgggatgttgttggcaagcgttgccaccatgccggctgccgcgatgttgttcatattcagtactttaccgacgctcatcagcggtttttcaaaccagcgagtcagcagcagcaccatcggatacgcccctaacagaacgcaggagatagaaccgataacttcaatggcgcgcatcacctcaccgggtttatcgccaggggccataaagataggatccagaccggggatcagttcccagccaagcaggaatttcactaccgcagcggcaagaccgagggtgatcaatgcaacgaggaatttggcgaagatctggaagccgttgatcattttttccgggatgaatttcagccccagcgccaccagaatcgcaacaatgatcaccgggatcatgttcatcaggatcagggcgaaagtgaattccaccggctggccgttgatctgcacaccggagtacatagcaaccagaccaccagcgatacaaccaatcggaatggtcacaatgcccgccagcacgccgagcgccagataacgacggtcagaaggttcgataatgccgagcgccaccggaatggaaaacacaatcgttggccccatcatgctcccgagaattaacccagagtatagccacgcggctacgtcgccgcccgccagctctttggcgaggaagaagccgcccatatcgcacgccagcagtgttccggcgaacatgcttgggttagcgccgagcatttcgtaaaccggaataattaccggcccgagaacgtgagccagtaccggtgccagcgcggtcataccgaccatcgccaggcccagtgcgcccattgccataaagccttcttcgaactgaccgccacttccttcgatacttttaccgaacttaccgaggaaacgagcagaaccgccgaactggctcaggatcctgtctacggcagctatcagcataaagaacatcatgatgtacatgatgatttcgttaattcccatcgcctttactccctgttagttgttatttattggcggatgcggcgtaaacgccttatccgccctacatgtgcaatcccgtaggctggataagacgcggcaagcgtcgcatccggcaattgcaccgcgccactggcggatgcggcgtgaacgccttatccgccctacatgtgcaatcccgtaggctggataagatgcggcaagcgtcgcatccggcatttattgcgccgctgcgtacaggccgacaatctgctccaggctggcggtacgcgggttactgcgcagacaaatatcttccagcgcggcctgcgcccatgcgccgtaatgcgcagatgtcgcaccaacatcgcccagtcgtttaccaatcccaacttccgcaatcagctcacttaccgcgttaatagcgtcacgatcgtcggattttttagttcgcagtgcccgaccaatctgactaaagcgttcacgacaaaccatccggttaaattccatcaccgttggcagcaacatggcgttcgcgagaccgtgcggaatatgcagcgccgcgcccggctgatgcgccatcgcgtggcacaacccaagacccgcactggaaaacgccattcccgccatacaactagccagcaacatgctctcgcgcgcggcaaggtcgtgaccgtagcccaccgctttcggcaggcttttgccaatcatcgcaatggcaccaatcgccagactgtcggtaaacggtgtagcgttcagggcgctgtatgcttcaatggcatgggttaacgcatcaatgccggtcatcgccgtgacatggctcggcacaccttcggtcaatgcggcgtcgaggatcgccacatccggcatcaggctggcatgggctaacacctgcttgcgcccgctcaccgcgtcgataatcaccgttacattggtggtttcagagccggttccggcggtagttggaatggcaatcagcggcaagcgcggttgcagaacgctggtttcactcatctctgccagcgtgctatccgggttcgtcaccagcaacgtcacggctttcgccgcatccagcacgctgccgccgccaaacgcgatcaccccatcacagccactctcacgcaactgcgccacggctgcacacacgtcggtaatgcacggttcgcccaccggacatggccagagcgtcatggcgatacctttaacggtcaggctacgcgtcagcccggcggtcatccctgcctgatgcaaaaagctgtctgccatcacgaacagatgtttcagcccacgcgtttgcgcttgctgtccgcaactgctcacgctgcccggaccgcaaagcgtcaccggtggaacgctaaatgtttttacccgttgcagattcagggtatcgaacgcctgaaagagcgcggtctgcaattcattttgcatatagcccctccgctttctctcgcccactactggcgatcgccagcggggtcataaacaaactgtgctgcggtaaatgcacctgtaacgccgggaattgtttgcgaaacagttccgccacgcccggttgcatacaagagccgcccgccagccataaatcagtaatgccctgcccttcaatatgccgggcgacaatgtccgccattttttcgtacaccggtttcaccgcaggccaaatctcttcaccgtgaccgcgcttgtactgctccgcctcttccaggctaatacggcgatttccggcgagagtcagagagatgtgatgtccgccggtggcttcatccgcgctgtacgtcaccttgccctttttcacgatggcaatgccggtagtgccgccgccgatatccactacaccggcgttgtccagttgcagcagatccgcaactgcggttggctcatccagcacatggctcacttccagtccggcagattccagcacgttgatggaaatacgcgggtccgtacctggaggaaaactagtcgccgcatggctaaaacgacgaccgaattgctgctcgagcgtgtcgagatggcgacgaacaatggtgacagcgccgaagaaatcccagacgatgccgtcgcgaaccacatcggcccagtcgaggcataccgccactggctgaccgtcgcggtcgacaaccatgctcaccacatcgcaggtgcccagatccacccccagccacagcggagattccgtcgcggcgggcgtctggttacacagcgttgccgccgtttgcagacgtggggtgagccattgttcgtcgtgcgccatctgttactccttaaacaatgcgaaacgcatcgactaatacacagcgacgcagacggacaaacgtacgcgcgctggttaccccttcaccggttggcgtggtgatggtcatggtggtccagccttccccgcccagccccagcccggcaatgcacggtccgttcttaacgaaaatgctggtatcaatagcattcgccatctggttcatgttttcgatgttgcggctgtgcattgccgccgtgtggtggcaaccgccttccagtttcaccgctagcgcaatggcatccgccacgttggcgacgcgcacgacgggcaacaccggcatcatcagttcagtcacggcaaacggatgttctgcggtggtttccacaaacagcaggcgcgtttcttgcggaactttaaggccgattgccgccgcgattttgcctgcgtcgcgaccaacccagtcacggctgacggtgccttttccgcgctcgtcgatatttttcagcaacaccggttgcagctgctgcgcctgttctgcggtcagtttcaccgcgtgctggccttccatcagacgcatcagttcatcggctacgctatcaacaacaatcagtaccttttcgtcggcacaaatgatgttgttatcgaaagaagcgcctttgacgatggactgagcggcacgggcgaggtcggcggtttcatccaccactaccggcgggttgccagcgcctgcggcaatcagacgtttattggtgtgtttacgcgccgcttctactaccgcttcgccgccggttaccaccagcaggccgatacccggaaacttgaacaagcgttgcgcggtttcgatatccggatttgccacagtaaccagtaagttttccggcccacctgcggcaacaatcgcctggttgagcagcgtaatcgcccgctgggagacttttttcgccgccggatgcggggcaaaaatgacgctgttgcccgcggcaatcaggctgatggcgttgttaattacggttgccgccgggttagtggaaggcgtcacgctagccaccacgccccagggtgcgttttcaattagggtcaggccgttgtcgccagtcagcacttgcggagagaggcactcaacgcctggtgtgccgcgcgcctgagcgacgttttttgcaaatttatcttcaacgcgccccatgccggtttcactgacggcaagttccgctaaatctctggcgtgtttttcgcctgcttcacgaatggcagcaatggctaactggcgcattgccacgctttttaacccttgctgggcgactttggctgccgcaacggcgtcatccagggacgcgaaaacgcccatctcatgaacggcggcggacggcgtgtcactgctttgcattttcagcagtaccgctttcaccacctgttcaatatcctgttgattcatgatgttctgccttatttgtggaaaattacctgaccgccagacaccacctcatcgacaatgccaatcacgcacagatcgaccggactcgtttcgcttttatgcgcctggcgggcggaactgccactcaccagtaacacccactccccggttcccgcgccaatattgtcgatggcgacggcgcattgcccgtcaggattaccttgtggatcaatcatttccaccatcagcaatttgtcatgcgccagtccgtgatggcgtacggtacaaacaatttgtccagtgacgactgccagtttcatacccgcctccgtggcgtatttcaggtaaaagctccccctaccctccgcagaaggtaaaatgaaaaaggagagagcgtgacgcccgaatcgacgtcacacagggtgattacaggttgctgctatcgcctttcaggccgatcgggaagacttcttccaggtcgccgtgcggacgcgggataacgtgtacagataccagctcgccgatacgctgtgccgctgcggcacctgcatcggtcgcggctttacaggctgcaacatcaccacgaaccatggcagtacacaggccgccgccaatctgcttaacaccaaccagcttgacgcgcgcagctttcaccatcgcgtcagaagcctcaatcagtgcaaccaggccccgggtttcgatcattcctaatgcttccattgtgctttcctctttatcagggtccagaacgggaccgttcattcaaccagtgtttgtaaactgctttcgcggttcacttctgtctgacgcggcacagctgccaccagcgccagctcgataatttcctgcacgctacaaccacgagagagatcgtgcatcggcgcggcaagtccttgtatcagtggcccgacggcacgatatccgccgagtcgttgtgcgattttgtaaccaatatttccggcttccaggctcggaaaaaccatcacattggccttgccctgtagcgggctggcaggcgctttttgcgccgccacttccggcacgaaggcggcgtcaaactgtaactcgccatccaccaccagctttggtgcgcgctcacggacgatttctgtcgcctgctggacgttagcaacacaggggtgacgggcgctaccattgctggaaaagctcagcatcgccacgcgcggctcttctccggtgatggcgcgccaggtttcggcactggcaagcgcgatatccgccagctgcgccgccgtcggctgtggcaccacgctgcaatcggcaaagcccaacgccgggccgctgtactgtggcaacatcaggaaaatggaagagagcgttttacagcctggctgcaagccgataatgcgtaatccggcacgcagcacatttgccgtggaagagaggttgcccgcgatacagacatccgctttaccggcgctgaccattgctgcggcgaacatcagagggtcggtaagtttttccagcgcatccggcggcgttttttcgcccgcgcgggccagccagcgatgagcaaattcttcccgcattgcgaggttgccatgcggatcaatcacctgtagcccgtccatcgccacgccgtgactgagcgcaaactgacgaagttcaaacggattggcgaccagaatgggcgttgccagaccttgttgatgtaaatattgcgcggctttcagcacacgttggtctaacgcatccggaaaaaccactctggcgggcgctcgcaacgccagttcacgacaacgttcaataatcattgcgtttcccccagtcgttgttggatctgcttcaccgttagcggctgcttcgttacgctcaggatcatcatcacgtagaccgtgctgctaaggcggttcagcgcctgcaaaatgtccgggcgtaatacttcaaagctgcgggtgataaagacctgcgccgctacggtttcggtttcccgcactttggtgcgtagcagattgagcaacgcagcatcgcgcccgtggctggcttccggcaccagatgatcgtggtcgagatagcgcagcggctgatgagaaagccgatgcagatcttcgtcagaaagcccgacaatcgcctggcagcccagcggttcccccagcgcatcggcgcgcataatgttgccaagacggctacggatatccgccagccacggctgccacggttccgccagttcaatttgcagccacactgccagcgcaatggtgctgtcgagaaccgcgcgaaaacccagacgcggatcgcttttggcgaccattttttccgcgctcaggtgagtcagcgtatccggcttttttgccaccggctggcgacacagttcgcagcacgcctgcggatgttcatcgctactggtcagcccatgaacgggctgcggctgctgctgttcatcgtcaacaaacaggcggccctgctcgtcaataaacttgatgcgcagatggcggctttccagcaactcccgggcagagggcgtcaggcgactgtccgcagggagatggatctctgcgccttcgctgagcgtatggttcgctcttagccatgcttcggtgatgaaatctttcatagggattgccagttagccggccaggcgacatacaggaatttcacgctggatgtcgtaccaaattcgatgctggagcctttcgggataaacatcacgtcgcctgctttggcgatcatggtttggccttcgtggcgaacatgcagctccccttccagcaccatgtcgatttcgtcgtagttcagggtccacgggaagaatgcgttctcccactgcataaaaccggcggccatgctgctgccgtcgtctccggtcacaagatcagtcaagcccacgcaatgcggctctgcgccgtcgaaacgaccaaacttgacgctactgccatcaatcactttgatgccgcctttgccggtcacgcttttgaagctcggctgcattgcgccctgctccaggctctgtttttccttcatcactttttccatcagctgtgcgaccaggctttcggtaaactggccttccggcagctgggcaatgatggtttcgcggatgcgctggctttcggttttgtcggctggcacgctggcgggcacggacgccgttaccgggatgctttcatcacattcggtgatggtaaaacccagtagatccgccacttcacgggcttccggggtaataatgctggcgcgcagaaccacggacattgcctgttcgccgcgcgcgtgtgcttcacgaatatcattcgctgtgatgagttttttcacctgcttcctcctgtttggtgagagatgccagataatccaccagttgctgcacgctttgcgggtcgtggctgtttagctcgaacatcggctcttcgaaacccgtctcaagcaataactttcgcgttgcggcgacgtcagcatctggcatgtccgttttactgatgacggcgatttgccgtttgctgacgccaatatccagcaacccggcaggcaaccgactttccgggtcatttgcgccatggacatagatcagcatgtctacatcctgtagcgtggtaattaaggcgtgataccagcggggatggttaaaatattcacccggcgtatcaatatcgcccttatcattaaattccacggcctgtgtttttctggcgagggtataattcccctgcaacgcattaaataacgttgtttttcctgccccgacgctacccacaaacgcaattcgtttcatgaatgcctcgtattaacttttggtcatttcacaaagcgtataatttaataagcgacctaaaccgctgacggtttgacttaacgcttcttctactgcgcccacgctgccataaatcaccaatgcaccgctgaatcggtcgagaaaaccgatatgcacatcagcggctttcagcgctaaatcaccggcgatcatcgccgtttcgccgggagttagcgtcataatgccaattgcgcccgcatccggaacgccgattttcttcgccagttcctcaccgggatgcgcgatgagatgcgccagtgtgacctgtttgccgggcacaaattcctgaatgatgcgttctttatccatgagtcgccgcctgtgaaaaactttcgtgtatcgtgacaatttttcgtcagagtaaataacaaaattcggcaagcgcgtttaaaaggtgaggtagatcactaagaatggagagatattcgctgtggtgcataaactttcatatgcaacgcatgaatataaataaaataatatcgagatattatatagactgcttttttttattattcgcaaactcagtaataagctttactaatatattgcagctaaactgcttaccctgaatattcagggtaagcgtgagagttaaaaaaaattacagcggttgggtttgcgcttctaccacggccagcgccaccatgttgacgatacgacgcacgcttgcgatcggcgttaacacgtgaaccggtttcgccacacccatcagcaccgggccgacagtcacaccttcgctgctggaaacacgcagtaagttgtaactaatgcgggcagcttccatgttcggcatcaccagaatattggcggaacctttcaaagagctgtccggcatacggtcgttgcgaatcgcttccaccagcgctgcatcgccgtgcatttcaccatcaatcatcagttctggtgcacgttccctgaccagttccagcgcctgacgcattttgctgctgctcgggcagtcagaagaaccaaagttggagtggctcaacaaagcaacgcgcggctcaataccaaaacgacggacagtttctgccgccatcaaggtgatctccgccagctcttctgcatccggttcatcattaacatatgtatcggcaataaaggtgttaccactcggcagcagcagcgcgttcatggcacctgcggtgtgaacgccatcgcgataaccaaagacatttttcaccacgctaaaatgttcatgataatcacccaccgtaccgcaaatcattgcatcggcttccccacgctgaaccatgatcgcgccgatcactgtcgggttactgatcagcgcccgctgcgcctgttcctgagtgacgccgcgacgcttcatgatctggaagtattcggtccagtactctttaaagcgcggatcggattcgttattgacgatctcaaaatcaacgcccgctttgatctgcaagcccagtttctgaatgcgcatttcgatcacgttcggacgaccgataaggatcggtttcgccagtcccagcgttaccagttcctgagtggcatgcagaacgcgcgcctcttccccttccggcagaacaacgcgcttcggcgctttgcgagcctgggagaaaatcggcttcataaacaggttggttttgtaaacgaactcagtcagcttgtcgatgtagacgtcgaaatcagcaatcggacgagtcgccacgccgctctccatcgcggctttagcgaccgcaggagcgatcttaacgatcaagcgcggatcaaacggctttggaatgatgtattccggaccaaagctcagatcctgatcgccatacgcactagccaccacttcgctctgttccgcatgggcgagttctgcaatcgcacgtaccgccgccagtttcatctcttcgttgatggcggttgcgccaacgtccagcgcgccacggaagatgaacgggaagcacaggacgttgttcacctggttcggatagtcagaacgaccggtgcaaatgatggcatccggacgcacttctttcgccagcggcggcagaatttccggttccgggttcgccagcgccaggatcattggcgcacgagccattttcttcaccatttcctgggtcagcactttcgggccggaacagcccaggaaaatatccgcgccttcaatcacatcatcgagggtacgtttgccgtcatccaccaccgcatatgcggctttggtttccgccatgtttggctcacggccctgatagataacgcctttactatcgcaaaccacgatgttatgtttttgcagacccagcgctaccagcaggttcatacaggcgattgctgcggcacccgcgccggaaaccaccatccgcacgtcggagatgtttttctccaccacgcgcaagccgttgaggatggcggcagtgctgataattgccgtgccgtgctgatcgtcgtggaataccggaatattcatccgctcgcgcagtttctgttcaatatagaaacattctggcgctttaatgtcttcgaggttgatgccgccgaaggttggttcgagcgcggcgacaacttcaataaatttgtccgggtcgagttcgtcaacttcaatgtcaaatacatcaatcccggcgaatttcttaaacagaacgcccttgccttccatcaccggtttgcctgccagcgcgccaatgttgcctaaccccagcaccgccgtaccgttagagatcaccgccaccaggttacctcgggcggtatatttgtaggcttttaacgggtctttttcgatttcaagacaaggtgcggcaacgcctggactgtaggccagcgccagatcgcgctgtgttgccagaggcttggttggagaaacctggattttccctggaactggaaattcatggaaatcaagtgcactttgttttaactggtcatccatttggttgttcctttcacgtaacgttcacaaataaagtgtgtgggcaacagcccctgcccacaacgtggcgcacattattaccctgccggagtctacagactttgagcaagtccaaactctcaccattaatataatgttttggtaataatcctataacactgatgttacctgcttaatccagcaataccatgcctgtctgctatgcttttttgatgcgtttagcgaaatttctcagaagtgtgaattaacgcactcatctaacactttacttttcaaggagtatttcctatgaacgagttagacggcatcaaacagttcaccactgtcgtggcagacagcggcgatattgagtccattcgccattatcatccccaggatgccaccaccaatcctagcctgttactcaaagctgccggattaagtcaatatgagcatttaatagacgatgctatcgcctggggtaaaaaaaatggcaagacccaggaacaacaggtggtcgcagcgtgtgacaaactggcggtcaatttcggtgctgaaatcctcaaaatcgtacccggtcgcgtgagtacagaagttgatgcacgcctctcttttgataaagaaaagagtattgagaaggcgcgccatctggtggacttgtatcagcaacaaggcgttgagaaaagtcgcattctgatcaagctggctagcacctgggaaggaattcgcgcggcagaagagctggaaaaagaaggtattaactgcaacctgacgctgctgttttcttttgcacaggcacgggcctgtgcggaagcaggcgtttttctgattagcccgtttgtcgggcgtatttatgactggtatcaggcacgcaagccgatggacccgtatgtggtggaagaagatccgggcgttaaaagcgtgcgcaatatctacgactactataagcaacaccactatgaaaccattgtgatgggcgcgagcttccgtcgcaccgaacaaatcctcgccttaaccggctgcgatcgactgactatcgcaccgaatttactgaaggagctgcaggaaaaagttagcccagtggtacgtaaattaatcccaccttctcagacgttcccacgcccagctcccatgagcgaagcggagttccgttgggagcacaatcaggatgcgatggcggtagaaaaactgtctgaaggcattcgtctgttcgccgttgatcaacgcaaactggaagatcttcttgccgccaaactataaaccagccacggagtgttatatgtcccgaaaagaccttgccaatgcgattcgcgcactcagtatggatgcggtacaaaaagccaactctggtcatcccggcgcgccgatgggcatggctgatattgccgaagtgctgtggaacgattttcttaaacataaccctaccgacccaacctggtatgatcgcgaccgctttattctttccaacggtcacgcgagcatgctgctctacagtttgctacatctgaccggttacgacctgccgctggaagaactgaagaacttccgtcagttgcatagcaaaaccccaggccacccggagattggctatacgccaggcgttgaaaccaccaccggcccgcttggacaaggtttggcgaacgccgtcgggctggcgatagcagagcgtacactggcggcgcagtttaaccagccagaccatgagatcgtcgatcacttcacctatgtgtttatgggcgacggctgcctgatggaaggtatttcccacgaagtctgtagcctggcaggcacgctgggactgggcaagctgattggtttttacgatcacaacggtatttccatcgacggtgaaacagaaggctggtttaccgacgatacggcaaaacgttttgaagcctatcactggcatgtgatccatgaaatcgacggtcacgatccgcaggcggtgaaggaagcgatccttgaagcgcaaagcgtgaaagataagccgagcctgattatctgccgtacggtgattggctttggtagcccgaataaagcaggtaaggaagaggcgcacggcgcaccactgggggaagaagaagtggcgctggcacggcaaaaactgggctggcaccatccgccatttgagatccctaaagagatttatcacgcctgggatgcccgtgaaaaaggcgaaaaagcgcagcagagctggaatgagaagtttgccgcctataaaaaggctcatccgcaactggcagaagagtttacccgacggatgagcggtggtttaccgaaggactgggagaaaacgactcagaaatatatcaatgagttacaggcaaatccggcgaaaatcgctacccgtaaggctagccaaaatacgcttaacgcttacgggccgatgctgcctgagttgctcggcggtagcgcggatctggctcccagcaacctgaccatctggaaaggttctgttagcctgaaggaagatccagcgggcaactacattcactacggggtgcgtgaatttggcatgaccgctatcgccaacggcatcgcgcaccacggcggctttgtgccgtataccgcgacgttcctgatgtttgttgaatacgcccgtaacgccgcgcggatggcggcactgatgaaagcgcggcagattatggtttatacccacgacagtattggcctgggcgaagatggtccgacgcaccaggctgttgagcaactggccagcctgcgcttaacgccaaatttcagcacctggcgaccgtgcgatcaggtggaagcggcggtgggctggaagctggcggttgagcgccacaacggaccgacggcactgatcctcagtaggcagaatctggcccaggtggaacgtacgccggatcaggttaaagagattgctcgtggcggttatgtgctgaaagacagcggcggtaagccagatattattctgattgccaccggtagtgagatggaaattaccctgcaagcggcagagaaattagcaggagaaggtcgcaatgtacgcgtagtttccctgcccagcaccgatattttcgacgcccaggatgaggaatatcgggagagcgtgttgccttctaacgttgcggctcgcgtggcggtggaagcaggtattgccgattactggtacaagtatgttggtctgaaaggggcaattgtcgggatgacgggttacggggaatctgctccggcggataagctgttcccgttctttggctttaccgccgagaatattgtggcaaaagcgcataaggtgctgggagtgaaaggtgcctgatggtgattgccggatgctgattgccggatgcgacgctgacgcgtcttatccggcctacagcgtcttatccggcctacatgtcccgccattttgtttaacgggtgatccacaacgtgggccaggcgtctggcccatgccagttatcgcaggtgggttctgcggcgtaacgcaccaggcgaaaacgctgaccgtcaaagcgccagcgcgcctgaatgccacaatcgcttaatccgcgccctttcgctaaggtcaccagttcacggcttttctcatcaaatgttgcgttcatcagttccagttcattcgtctcctgaccgttgttgaacggcaaacgcaaccgaaccgggcggctagctagtggctttttacggctcacaatccatgccaaatcaatggtgttataggcccctgcctcacagctaatcatcatcagcgctttatcatcagtcagcgcagtgacattcacctcacgacgcaatggatcaaggctgcagcgcagaccattcatccgccagtttccataatccagcaaatcgttgcgttcttcgagactgagtggcgtcggcgttgggttaaccaccgcgacctctttcagcgcaggcgcgggcggtacgctgagcggcggttcgtcccctttcttgatccacgcggtttcactgccaacgcgcttttgctgagcatcaataaacaacaacgctgcttttaagccactcagagaaatggtctgatcgccatcgcgtaaggtgattgccttcccttcctgaatcatctgcaaaaacgcggtgatggttgccgtatcatcggttactaataaccatggactaatccgccacttgtcaccacttaacgccaacggctcgccatctaacagcagccgtggcgctatctccccttcactcgcctccgggctcttcaatccgccgcgctcaatacgtaaaacggcatcggtatgcgccccggcgctgcggctcagggtcatcaccagtccattatgatcgcccgtattacgcgccacgcagaaattttggttattacaggtgacctgccagtcggaaaacgcccgttgcgctggtgccgcccacaccaaagacgtcggcaacaaagcgaaaaaaaagagaaggaaaatgcgatagcgcatggacggtacgaccccagaagttcaaacaaacagcacaagtcgtatcttcgttgcgcaggtagcgcggctcaatcggatttgtcggattgagccaataataaacaacgaaatattattgttatttttcagtccattaaatgactcgtttgcaaatagttaagcaataacaccgtcttaccgtcacgtatctcgccggttttgatcatctccagcgcctggctgaacggcagctcgagcacttcaatatcttcatcttcgacaccgccaccggcgttagcgcgctgattgtcactgtattcggcgataaaaaagtggattagctcagtcacaccgcctgggctcatatacagttcaaataatttgcgcacttcacccacttcatagcccgtctcttcaatcgcttctttgcgaatacacacttccggttcgtcgttatccagcagcccggcgcagctttcaatcagctgcccgctttcattgccattaacccaggtagcgacacggaactgacgaatcagaaccacggtctttttcttcgtgttgtacaggaggatcgtcgcaccattgccgcgatcgtacacttcacgtttatggcggataacttcgccgtctttgcgcgtgagatcgtaagtaatgttgtgcagggtgaaatagttatcggagagaattttgtctttaatgagggtgatttgttgcgtcataccgactccacagcgcgaaatgaacaattatcttacgctgtgaagtcgggtttgtctgcgcaggctatcagtgagatttgacactttttacccccagccagtcaataatcccctgtgccgcatgacgtccttctgccattgcggtaaccaccagatccgcaccacgcacggcgtcaccaccagcgaagattttcggattggtggtctggtaacggtactggctttccacatccgcgatgatgcggccccatttgtctaccgttacaccgtggctctccagccacggcatcccgtgcggattgaagccaaacgccataatcaccgcgtcggctggcatgacaaattcactgccttccaccggcactggacgccgacgcccctgggcatccggctctccaagacgcgtgcgcaggaaacgaatcccgcagacgtgaccttgttcattcagctcaagcgccaccggctggacgttaaattcgaagttggccccctcttcgcgggcgttcttcacttctttcttgctgcctggcatgttagcttcatcacgacgataagcgcaggtgacgttactcgcgccgtggcgcagtgcggtacgcacacagtccatcgcggtgtcgccgccgcccagtaccacgacgttaagtccggcggtattgataaacggctcttccggtagctcttcgagccccatcacctgtttagtgttggcaatgaggaacggcagcgcgtcataaacgcccggcgcatcttcattgggtaaacccgctttcatggaacggtaagtgcctacgccaacgaagaccgcgtcgtattgttccaaaaggctatccaaagagacatctttacccacttcacaattgagttcgaagtgaatccccatcgcgctgaagatttcccgacggcgtgccagcagggatttatccagtttgaaagaaggaatgccgaaagtgagcaagccaccgatttctggatggcgatcgtacaccgtcacccccacgccattgcgggtcagaacatccgcacaggccagccctgccggacctgcaccgataatcgccacccgcttgtccactttggtgacatggcttaagtcaggacgccaacctttcgccaacgcctgatcactaatgtagcgttcaatgttgccgatagttaccgcgccgtgctcatcgcgaatagtacaggcaccttcacacaaacggtcttgcggacaaacgcgtccggtaatttccggcagggtgttggtctggtgagaaagctcgacggcggcgtcgatgtttccggctttcaccagttcaatccactgcggtatatggttatgcagcgggcaggtccattcacaaacgctgtgctcgccgcacttaaggcagcggctggcttcccgttgtgcctggtcggcgcgaaatggcagataaatttcatcaaaaccggttttgcgcgcttcaatcgccagtttatccggctcgccacgcgcgggcgttgcctgcatttgttcgactttactcattaccggcatttcttgcgccgcggtactggcatgccacggttgatgttcctgacgcgcggtgcgcaagcggcgggatttcgccatgccggagagtgcgacgtcagtgaccagttgcagcgcgtccgccgggcaattctcaacacaggcaggaccgttttcgcgccccgcacaaaggtcgcatttatgcgccgtggcttttacttttcctgccgcgacgggtgtcaggacgatttgcatcgtaccaaaaggacaggccaccacgcaggatttacagccaatacacttttgctgattgacctgaatgctgtcatcaacgtggctgattgcgccattagggcagctacgggcgcagggcgcatcttcacaatggtgacaggtcactgcactacgttgctgttgatgtttgataaccgtaattcggggatgaaaatggtgttggctcaggacatgttgctcatcattgtgagccatgacacaggcgatttcacaagcatgacaacccagacattgctgactgttggccataataaaacgattcataacgaccttcttttttggttgtaaaaaccttattctttatatgagtgttgttattacccgacttacaggggaatcggcaatgttcatgtgcccagaataagtaactatttcgctataaactgtggcagatcaaataatcccatcactgactaaattgcgtttcagcgaactggaacattaatgattttttgtggagaagacgcgtgtgattgttaaacgacccgtcagcgccagtctggcccgggcctttttttacattgtgctgctgagcattctttccacgggtatcgctctgctaactctggcgagcagtttgcgcgacgctgaggctatcaatattgccggaagcctgcgtatgcagagttaccgcctgggctacgacttgcaaagtggcagtccacaactcaatgcacatcgccagttatttcagcaggcactgcatagtccggtattaaccaacctcaacgtctggtatgtgccagaagcagtaaaaactcgctatgcgcatctgaatgccaactggctggagatgaataatcggctcagcaagggcgatttgccgtggtatcaggccaatattaataattatgttaatcagatagacctgttcgtactggctttacagcactacgctgaacgcaaaatgctgctggtggtggcgatttccctggctggcggcatcggtattttcacgctggtcttttttactttgcgccgcatacgccatcaggtggttgccccgctgaatcagctggttaccgccagtcagcgtattgaacacgggcagttcgacagcccgccgctggataccaacctgccgaatgagcttggtctgcttgcaaaaacctttaaccagatgagcagcgagctgcataaattgtaccgtagcctggaagcgagtgtagaagaaaagacccgcgatctccacgaggccaagcgtcgtctggaggtgttgtatcagtgtagccaggcgctgaacactagccagattgatgtgcattgtttccgccatattttgcagattgttcgcgacaatgaagcggctgaatatctggagttaaatgtcggtgaaaactggcggattagcgaagggcaaccaaacccggaattgccgatgcagattttaccggtgacaatgcaagagacggtttacggcgaactgcactggcaaaatagtcacgttagtagtagtgaaccgctgcttaacagcgttagcagcatgctgggacgcggtttgtactttaatcaggcgcagaagcattttcagcaattattgttgatggaagaacgtgcgaccatcgcccgcgaattgcacgacagcctggctcaggtactttcttacttacgtatccagttgacgttactgaagcgtagcataccggaagataacgccaccgcacaaagtatcatggccgatttttcccaggcgttgaatgatgcttatcggcagttacgcgagctgttgactactttccgcctgacgctgcagcaggcggatctcccctccgcattgagggaaatgctggatacgttacaaaatcaaaccagcgccaaactgaccctcgactgccgtctgccaaccctggcactggatgcgcaaatgcaggtgcatttgttgcaaattattcgcgaagcggtgctgaatgcgatgaagcacgccaacgccagcgaaatcgccgtcagttgcgtcaccgcgccggacggcaatcacacggtttatatccgtgataacgggattggtatcggtgaaccgaaagaacccgaaggtcattatggtctgaatatcatgcgcgaacgcgcggaacggctaggtgggacgctgacttttagtcaaccttccggcggcggcacgttagtgagtattagctttcgctctgcggagggtgaggaaagtcagttaatgtaatgcctcctactgaccaaagaatacttgcacttaaggttcagtataaaagggcatgataatttacattaactcctttttttctccacgattggctcgtaccttgccgctacagtgaagcaagtcaagcctacaacgatacgcagaaacacgaggtcctcttttaatggcgaatttctttattgatcgccccatttttgcctgggtgctggcaatcctgttgtgtctgacaggtaccctggcgatttttagtttgcccgttgaacaataccccgatctcgcgccaccgaatgtgcgagtgaccgctaactatcccggcgcaagcgcccagacgctggaaaacaccgtgacccaggttatcgagcaaaatatgaccggcctcgataatctcatgtatatgagttctcagagcagtggcaccggtcaggcatctgtcactttaagttttaaagcaggcaccgatccggacgaagccgtgcagcaagtacaaaaccagctgcaaagtgccatgcgaaagttaccgcaggcggtgcaaaatcagggcgtgacggtgcgtaaaaccggcgataccaacattctgaccattgccttcgtctctaccgatggtagcatggataaacaggatattgctgattatgttgccagtaatattcaggacccgttaagccgcgtgaatggcgtcggggatatcgatgcctatggtagccaatattccatgcgtatctggctggacccggcgaaactcaacagtttccagatgacggctaaagatgtcactgatgccattgagagtcagaacgcgcagattgcggttgggcaacttggtggtacaccttccgtcgataagcaggcgctcaacgccaccattaacgcccagagtctgctgcaaacaccagaacagttccgcgatatcaccttgcgggtcaatcaggacggcagtgaggtaaggctgggcgatgtcgccaccgtcgaaatgggggcggagaaatacgattatcttagccgcttcaatggtaagccagcctccgggctgggggtaaaactggcctccggcgctaacgaaatggcgacagcggagctggtgctcaatcgtctcgacgagctggcgcagtatttcccgcatggactggaatacaaggtggcgtatgaaaccaccagctttgttaaagcctccattgaagacgtggtgaaaacgctgctggaagctatcgctctggttttcctcgttatgtatctgttcctgcaaaacttccgcgccacgctgatacccactatcgccgtgccggtggtgttgatgggaaccttctccgtactttacgccttcggttacagcgtcaacaccttaaccatgttcgcgatggtgctggcgatcggtctgctggtggatgacgccatcgtggtggtggaaaacgtcgaacgtattatgagtgaggaaggactcactcctcgcgaagccacacgtaaaagcatggggcagatccagggggcactggtcgggattgcgatggttcttagcgcggtatttgtaccaatggccttcttcggcggcaccaccggtgccatctatcgccagttctctattaccattgttgcggcgatggtgctgagtgtactggtagcgatgatcctcactccggctctgtgtgccacactacttaagccactgaaaaaaggtgagcatcatgggcaaaaaggcttttttgcctggtttaaccagatgtttaaccgcaacgccgaacgctacgaaaaaggggtggcgaaaattctccaccgtagcctgcgctggattgtgatttatgtcctgctgcttggcggcatggtgttcctgttcctgcgtttgccgacgagcttcttaccgctggaagaccgtggcatgtttactaccagcgtacagttgcccagcggtagtacgcaacaacagaccctgaaagtcgttgagcaaatcgagaaatactacttcacccatgaaaaagacaacatcatgagcgtgtttgccaccgttggttctggccctgggggtaacgggcaaaacgtggcgcgaatgtttatccgcctgaaagactggagcgaacgcgacagtaagaccggcaccagctttgccattatcgagcgtgcaacgaaggcgtttaaccaaattaaagaagctcgcgttatcgccagcagcccgccagcaattagcggtcttggtagttctgcaggttttgatatggagttgcaggaccacgctggagcgggtcacgatgcgctgatggcagcacgtaatcagttgctggcgctggcggcggaaaacccggagctaacccgtgtgcgccataacggcctcgacgacagtccgcagttgcagattgatatcgaccagcgtaaagctcaggcgctgggcgttgctatcgacgatattaacgacacactgcaaaccgcctggggtagcagctatgtgaatgactttatggatcgcggtcgcgtgaagaaagtctatgtgcaggcagctgcgccgtatcgcatgctgccagatgacatcaatctctggtatgtccgaaataaagatggcggcatggtgcccttctctgctttcgcgaccagtcgctgggaaacaggcagcccgcgtctggaacgctataacggttattctgcggttgagattgttggggaagccgcaccgggggtcagtaccggtacggcgatggatattatggaaagcttagtgaagcagctgccaaacggctttggtctggagtggacggcgatgagctatcaggagcggctttccggcgcgcaggctccggcgctgtacgccatttccttgctggtggtattcctgtgtctggctgcgttgtatgaaagctggagcgtgccgttcagcgtaatgctggtcgtgccgctgggggtaatcggcgcgctgctggcaacctggatgcgcgggctggaaaacgacgtttacttccaggtgggcctgttaacggtcattggtttaagcgcgaaaaacgccatcctgatcgtcgagtttgctaacgagatgaaccaaaaaggccacgacctgtttgaagcgacgctccacgcctgccgtcagcgtttacgcccgattctgatgaccagcctggcatttatcttcggcgtattgccaatggcaaccagcacgggtgccggttccggtggtcagcatgcggtgggtactggcgtaatgggcgggatgattagcgccactattctggctatttacttcgtgccgctgttctttgtgctggtgcgccgccgcttcccgctgaagccgcgcccggaataagcaataaaaaaggcgacatgccaatgtgtcgcctttttcaactttccgattaagaacctgctcagcgggttcttgctgtttgtactttgtctcaggaattacttacgaagcataacttcgataaagtctttccagttccccagttcacgttcaatcataacaacctctcttataattatgggtattctacggaaacaatataccgtggtgaagctaatttactcgattgctgcgatgactacctccgggggacaaatcttatgtaaatactatggtcctgcggtgatgatttgtatgtgatacacagcaacatttcgagatattcatacggcatctaatactgatttaattctggttaaaatacagacagataacaagatgaatattcttaatgtttacgttaaaaatgtttaatattatttaatagttgttaatttgaatacttcgataatgttatatttcctgataatcatttgcaggcaaaatgttttcacccttaaatgagtatttattctcataaatcgaaaaaggattcattatggttacactttacggtatcaaaaattgtgacaccattaaaaaggctcgccgttggctggaagccaataacatcgactatcgttttcatgattaccgcgtcgatgggctggacagcgaattattgaacgattttatcaacgaattaggctgggaagcgttactcaacacccgtggtacaacctggcgtaaactggacgaaaccacccgcaataaaatcaccgatgcggcctctgcggcggcattaatgactgaaatgcctgcaattatcaaacgtccattgctctgcgtgcccggtaagcctatgctgctgggtttcagtgattccagttatcagcaatttttccatgaggtgtaatctatgagctgcccggttattgagctgacacaacagcttattcgccgcccttccctgagtcctgatgatgcaggatgccaggctttgttgattgaacgtttgcaggcgatcggttttaccgttgaacgcatggactttgccgatacgcagaatttttgggcatggcgtgggcagggtgaaacgttagcctttgccgggcataccgacgtggtgccgcctggcgacgccgatcgttggatcaatcccccgtttgaacccaccattcgtgacggcatgttattcgggcgcggtgcggcagatatgaaaggcagcctggcggcgatggtggtggcggcagaacgttttgtcgcacaacatcccaaccatacggggcgactggcatttctgatcacctctgatgaagaagccagtgcccacaacggtacggtaaaagtcgtcgaagcgttaatggcacgtaatgagcgtctcgattactgcctggttggcgaaccgagcagtatcgaagtggtaggtgatgtggtgaaaaatggtcgtcgcggaagtttaacctgcaaccttaccattcatggcgttcaggggcatgttgcctacccacatctggctgacaatccggtacatcgcgcagcacctttccttaatgaattagtggctattgagtgggatcagggcaatgaattcttcccggcgaccagtatgcagattgccaatattcaggcgggaacgggcagtaacaacgttattccgggtgaactgtttgtgcagtttaacttccgcttcagcaccgaactgactgatgagatgatcaaagcgcaggtgcttgccctgcttgaaaaacatcaactgcgctatacggtggattggtggctttccgggcagccatttttgaccgcgcgcggtaaactggtggatgcggtcgttaacgcggttgagcactataatgaaattaaaccgcagctactgaccacaggcggaacgtccgacgggcgctttattgcccgcatgggggcgcaggtggtggaactcgggccggtcaatgccactattcataaaattaatgaatgtgtgaacgctgccgacctgcagctacttgcccgtatgtatcaacgtatcatggaacagctcgtcgcctgatgagtggttctgcaagaggaaataagcatggactggctggctaaatattggtggattctggtgattgtctttttggtaggcgtcctgctgaacgtgattaaagatctcaagcgcgtcgaccataagaaatttctcgccaacaagccggagcttcccccgcatcgtgatttcaacgataagtgggacgatgacgacgactggccgaaaaaggatcaaccgaagaagtaagctgagtgctcaaccgtaggccggataaggcgttaacgccgcatccggcaatggtgaacgatgcctgatgcgacgctcacgcgtcttatcaggccaggtaatctgtcttttacatcatttcaatcacatcatcatcgccaggcttaccgccacttagcgcttcgtcgaaataatgtttcggaatggtataacgcaagtgatccagggcaaattgcatactgcgattgtcgatcgcatggcctaaatcctccacgatatccagcgtcacgtcaccaccggcactgattaacgcttcctgcgccgcaaccgcatgcgccagatcgataaccggatcttcaccgccatgaatcaggtgaattgtcgtggctgtagacgcagtttccggcaggctcgcatagcgtccgttaaaagcaatgacgcgactagcaaggcccggttcggctttaatgctctccagcaccataatcgcgccttgagagaaaccgatgagcgccgtggcgttagcccctactccgctctgtttctgccagtagcgcaccgtttcaataaacgtcggcatgatcgcatccacacgcgcctggcgattatcttccgtaataccctgcacgctaaaccactgacgccccgccggattaccgctcggctccgcgccaccgacactcaccaccagcgcatcaggaaacagcggtgcaaaccagttgcctatttcccccattgccaccgggttatccccgacaccgtggaaaagcagtaacaactgttgcgcaggtttatccgggctttgaacaacaaaatggtcatgtttcatggcgaactccttaactgatgtcattaattttacgccgctgactcacaatgaccatgagataaaattgaaggagtcagtgaaataattgccattgcgttatgcgatcgcgcagacgctcagtgcgaacatcattaagtgcgaacagcgcctgcgcggcctcttcccgctgacggaccagtaacatcttgcggccactaagtttaagtgtggtacataactgcgcatcactggcgtttttctgtaaacgcccacgcagcgccggtaatgccagttcactggtttgtaacagacgcaataagcaacctaagctcgttaatagcggacgatgagcgaaagcaaaaccggccagttcaagccagtcgtcgtcagaaaggacggcatcgtttagtggatcaacaggaagcgtttcgccattccactgcgcgagagcttgcgcatcgcgacgtaaacggtaatgctcacgttcagccagctgtttacccgcatcactcatcggtaacagcgccatcgccgtatagcaaccgctgctggcttcccgatgattacccatccgcaccagcacaaaaccgcagcgttgccagaaacgccataactccccggtgtaaccaaaactcacgctaagatagtcgaggtcttgcgtatattgcaaagcaccagcaataagttgccgccctgtgccttcccgctgacgagccggatgaactgctatccggctgacccgccgtccacgcaatgtcgccgccagtggattgttgccgtgcgccgccaggctctgggccaccagattaccccgcgggcgacgaaaacctgcccataccgcctgactgagttgttgagataatccaccctcatccaccagccacagcgccccggcaatctcgttttcgccagccgcctgtaaaaaatgttgccctggtgcatccatcatccggcgtaaatccagcgggctagtccgatagtgcgcaccagacaagagctgataaacctttaacggcgtttctggatcgctttgccataacgtctgttcaaatgcggaaatgacaatattgccttgtggtgtatgggtgaagttttcatcgtcaaaaaccagtgcctcgctgaccattttttccagcgggcatccctgcgcccagcggatcggctgttgcagttcaaaacggtgtaaatgcggaaagcgagcgcaaaatttcagcaaaaaaccacgtccggtgccttcgtagccctgcaccgtagtggttaacaacgttcgaggaaaacggcttaccagttgatgcaacaatggcgcaggtatggctgcggcttcatcgaccaccagccagtcggcttgctcatcgctggctaacaaggcatccggcgcaataaagcgaaacttctcgcccgcaaattgtgccagtacatccgtactcgcttttgcgggcgcggtgacaatcgctctgcccgcaatacgagaaatgagttgccctgccaacgcgctcttaccgcgcccacgcgcagccgttaccgctgccacgcccggcggcatggtcattagctgctttaagagttgctgttgttctggttgtggtgcgccagtcgcggggtaccagtcagtacggggagtaaaatgcgccaagctgaatggctggttttgccgccagaggatagcctcgttatccgccgtaagtacgcgtttgagatgctggacaaaatgcggcgtcgcaatagggtcagggcaatcactccagcgcaggctgtcggcatcaggttggttttcccactcttcccatacagggagtaacaaaaccagccagcttcccgctttcaacgttccgctaagtgcggcaaaggcagcggcatcaaagccgtggcgggcgtcgaataccgcatgccggaactcgcgcccaagtaaagtttgtagtgcgctgggagaacagtggttttcagcatctggccgcgggctaatccacagccagtcgccaggtaaggcatcacgcaacttaagagtatgctcaaaacaccaaccctcttccccgctcaacaccagcaagcggcggatcccttcacgtttcatttgcgctgttaatgtgtgaagcgcagtcagttcagccatccctgccccggaagttaaatgcttttaccaaaagtattgcattgtgccggatcgccgctgtcgaaaccacgtttaaaccagctgtagcgttgctgagaagtgccatgagtgaaactgtctggtactactcgcccctgactttgctgttgtaaacggtcatcgccgatggcctgcgccgcgttcagcgcctcttccagatcgccggtttccagaacgccttgctgctgcatactatgcccccagacaccggcaaaacagtcggcctggagttccatacgcacagataagcggtttacttccgcctgcgtcgcgttttgttgcagttgacgaactttcggctcgatgcctaacagtttctgcacatgatgaccgacttcatgggcgataacgtacccctgggcaaaatcgccatccgcgccaagtttgtctttcatgtcatcatagaaggagagatcgatataaaccgtgccatccgccgggcaatagaacggccccattatggactggcccgccccgcagccggtacgcgtcattccacggtacatgaccagcttcggttgctgataggtcttacccatcttctcgaactgttgtccccaggtgtcttccgtggttgccagaatcacgctggtgaattttgcggcttcgtcttcatttgggctaatactccgcgtactttgttgttgggaaaccggctgcccggtcatcaacccggttaaatcaacaccatagtagcctgcaaccagcacgactatcagtaaaatcagcccgcctttaccgcttggcaggcgaaaaccgggaccgcccatagatggaccaccagagctgttgcgcctgtcttcaacattgtcactttcacgtcgcccttgccaacgcatagatacctcaacaatatattcattatagaaatgatcgtaggtggttcagaggaagattaccacaggaaagcgggatgaaatggcggaggaatgagcgttcaatgcatatattccgagagcggttgtcttgccgtgccagctgcacggcaagatgatgaacagaaaaatcagtccagctgtacacccaggcggcgggcgacggcttcataggcttcgatcaggccaccgaggctctggcggaaacggtctttgtccattttctccagcgtttctttgtcccacaggcggctaccgtccggggagaactcatcacccagtaccacttcgcctttgtacagaccaaattccagcttgaagtcgaccagaatcagaccagcatcatcgaacagttttttcagcacgtcgttcgctttgtaggtcagctctttcatacgcgccaggttctctttgctcacccagccaaaggtttcgcagtaagattcgttgaccatcggatcgtgcatggcgtcgtttttcaggaacagatcgaacagcggcgggttcagctcaataccttcttcgattccaagacgtttcaccagagagccagcagcacggttacgcacgacacactcaaccggcaccatatccagctttttcaccagacattcggtatcggagagcagacgctccatttgagtcgggatacccgcttcagccagtttgctcataatgaagtagttgaacttgttgttcaccatacctttgcgatcaaactgctcaatgcgcgcgccatcccctgcactcgtatcattgcggaattcgagcaccaacaggtccgggttttccgtgctgtatacggttttcgctttaccacgatacaactcagcttgcttttgcatctttatcactcctgggtgtgaattaacgttttaaaatcttttgctgtctggtgtgccggatgttttgtcggatgcggcgtgaacgccttatccgaactacgtccgacaaacaaatttcgtgcgaattaccgctaaaatcgcgttttcctgcagacgcacacgtttgcgtatcatatcagaaaaaagggccggatgattccagccctgtatttttacttgctaaacgcagcctggaagacagctaccagcgcgtcgttctgactctgagtcagagtatgacctttcggatcgatgaactgtaggctgctgcggttatctaaatcgccaacctgcagtttatagtcaccggatgccaggcctggatcgctcgcgcccagttcctgccagtcgctgtcagacagcggcttataagttacggccatgttgccctggctacgggtgctgtcggtcactttcatgcccactttttccagcgccgctggcagacgttgccaaaccacattgaacggcccgcgtacgaccagcattggtaaaccggtgtcatcagctgcactttgtacgtccatagtggtggaggcacgattttgcgcagcgttcgcggcgtcagtggcagatttatccagaccggcggaaataacgttcatcatctccgtgctgtaacgctgcatggaagccgcgtctgcaaccggtttgcccgcctgttccaggttcagcagtttaaccgtaaccgcctgctgataaccctgcggcttaacagagatttgataacgaccacgatactgctcgtcttcgtccagacggttccattgtacccaatcggtggtcagtgtctgaccagcatcatcacgttgggtgatggtgtagtttttcgcctgcagcacgctaaccacctgcggccacagagtattgccacgaccattttccaccagcaaactagcggtatcgcccgtgaactgggtacgcgcgccagaaaccagtgccagcggctgggctggtggacgaatgtccagcgccttaccgacagcaccactaccgttggtcaccgggattgcataatcaccggaggtcaccggcaaaatcattccagccggggcatgaagctccgcaagcggtgccgcttccaggtaggcttcatcaccactgacctgacgcttatagcgactgtcagaactacaggcagcgagtaataaaacaaggctaacacccgcaacctttgccaggcggctcttttgaacagagtaagccatcaaatctccctaaactttacagcaaaccggcatgcttaagcgccgctctgaccgtctcacgaccactgtcggtgattggtgtcattggcaggcgcagcgtatcggtcgccacaagacccagttccttacatgcccatttcaccgggattggattgggttcgacaaatagtttgttgtgtaatggcatcagacgctgattaataacgcgtgcctcggcaaaatgcccttctgctgccagtttgcacatctgggccatatcacgcgctgcgacgttagccgtaacggaaataaccccatgaccgcccaattgcatgaagtccagcgcgctcgcatcatcgccgctcagcagaacaaaatcatcactaaccagctctttgatctggtttacacgcgttaagttccctgttgcctctttgattccgataatattttttactttcgccagacggcccaccgtttccgggagcagatcgcagccagtacgggacggcacattatacagaatttgcggcaggtcagtatgctcagcgatggctttgaaatgctgatacaaaccttcttggctcggacgattgtagtaaggggttaccgtcaggcagccgacgataccactgtcattgaagcgctgcgtcaggctaatggcttccgcagtagcgttagcgccggtcccggcaattaccggaatgcgcccatcagccagatccagcgtcatcatcaccacatcagcatgttcgtcatgatttaaggtagcggactcgccagtggtgccaacagaaacgatcgcgctagtaccgctggcgacatgataatcaatcagttttttcaagctagcccgacagacattacctttttcatccatcggagtaacaatcgcgacaatacttcccgtgaacatgggccatcctctgtgcaaacaagtgtctcaatggtacgtttggtatggcattaaaagcaagcagacagaaccgttctgattgttgtatgcatgtttttttatgctttccttaagaacaactcaccccttaaaggaataaccagtttgacactgagtagccaacattatctggtgatcactgcgttgggtgccgatcgccctggaattgtgaacaccatcacccgtcatgtcagtagttgcggctgtaatattgaagacagtcgcctggcgatgctgggagaagagttcacgtttattatgctgctttccggtagttggaatgccattactctgattgaaagtacgttaccgttgaaaggtgccgaactggatcttttaatcgtgatgaagcgcacgacggcgcgtccgcgtccgccaatgccagcatctgtctgggttcaggtcgatgtggcagactccccgcatttaattgaacgcttcacagcacttttcgacgcgcatcatatgaacattgcggagctggtgagccgcacgcaacctgctgaaaatgaacgggctgcgcagttgcatattcagataaccgcccacagccccgcatctgcggacgcagcaaatattgagcaagcgttcaaagccctatgtacagaactcaatgcacaaggcagtattaacgtcgtcaattattcccaacatgatgaacaggatggagttaagtaatgaatccactgaaagccggtgatatcgcaccgaaatttagcttgccggatcaagacggagaacaagttaatttgaccgacttccagggacagcgtgttctggtttatttctacccgaaagccatgacccccggctgtaccgtacaggcctgcggcttacgcgataacatggatgagttgaaaaaagcgggcgttgatgtgctgggtatcagcaccgataaacccgaaaaactctcccgttttgcggaaaaagagctgcttaactttacgctcctgtctgatgaggaccaccaggtgtgcgaacaattcggcgtctggggtgaaaagtccttcatgggcaaaacctacgatggcattcatcgcatcagcttcctgattgacgctgatggcaaaatcgaacatgtctttgacgatttcaaaaccagcaatcaccacgacgttgtgctgaactggctgaaagaacacgcctgattactttgctccattccgtgctggctgcgcttgcggccagcatacctcacttctcgtgatcaagatcacattctcgctttcccctgcgacacgggtgtcgaatccattttttgctgaacgttaatgaccatcatttttgtaccgttcagaatccagttaatacataacttattgaatatattgagttaatcagaatggcatcctttatgcaatatgaaatgcaatgtttcatatcattttcaaggagccgacatgaaccgctttgtggtggccgaaccactgtggtgtacaggatgtaatacctgtctcgctgcctgtagcgacgtgcataaaacgcaaggtttacagcaacacccgcgcctggccctggcgaagacgagtacaatcactgcccctgtcgtgtgtcatcactgtgaggaagccccttgcctgcaggtctgcccggtcaatgccatctctcagagggatgatgcgatccaactcaacgaaagcctctgtattggctgcaagctttgcgccgtggtctgcccatttggcgcaatcagcgctagtggaagccgtccggtgaatgcccatgcgcaatatgtttttcaggctgaaggcagtctcaaagacggcgaagaaaacgcgccaacacaacatgctttgctgcgctgggaacctggtgtccagaccgtcgcggtgaaatgcgacctgtgtgatttcttgccagaaggtccggcctgcgttcgcgcttgcccgaatcaggcgttacggctgatcaccggtgatagcctgcaacgtcagatgaaagaaaaacagcgccttgccgcaagctggtttgccaatggcggggaggatcccctttccctcactcaggagcaacgctaatggatgccctgcaattattaacctggagcctgattctctatctgtttgctagtctggctagcctgtttttactcggtctggacagactggctattaagctttccggcatcacaagcctggtgggcggcgtgattggcatcatcagcggaattacgcaattacatgctggtgtaactttagtcgcccgttttgcccccccttttgaatttgccgatttaaccctgcgaatggatagcctcagcgcatttatggtgctggttatctccttgctggtggtggtttgttctctctatagtttgacttatatgcgcgaatacgagggcaaaggcgcggcggcgatgggcttctttatgaatattttcatcgcaagcatggttgccctgctggtgatggacaacgctttttggttcatcgtgctgtttgaaatgatgagcctgtcttcctggtttctggtcattgccaggcaggataaaacgagcatcaacgctggcatgctctacttttttatcgcccacgccggaagcgtgctgataatgatcgccttcttgctgatggggcgcgaaagcggcagcctcgattttgccagtttccgcacgcttagtctttctccggggctggcgagcgcggtgttcctgctggcctttttcggttttggcgcgaaagccgggatgatgccgttgcacagctggttgccgcgcgctcaccctgccgcaccaagccacgctagcgcgttgatgtctggcgtaatggtcaaaataggtattttcggcatcctgaaagtagcgatggatctgctggcgcaaacgggtttgcctctgtggtggggcattctggtgatggcgatcggcgcaatctccgcgctcctgggcgtgctatatgcgctggcggaacaggatatcaaacggctgctggcctggagtaccgtcgaaaacgtcggcattattttgctggcagtcggtgtggcgatggtcggtctgagtctgcacgacccgctgctcaccgtggttggactgctcggcgcactgtttcatctgctcaaccatgcgctgttcaaagggctgctatttctcggcgcgggagcgattattagccgtttgcatacccacgacatggaaaaaatgggggcactagcgaaacggatgccgtggacagccgcagcatgcctgattggttgcctcgcgataagcgccattcctccgctgaatggttttatcagcgaatggtacacctggcagagcctgttcagtctaagtcgtgtggaagccgtagcgctacaacttgcgggtcctattgctatggtaatgctggcagtcactggtgggctggcagtaatgtgcttcgtaaaaatgtacggtattactttctgtggtgcgccgcgcagtacacacgctgaagaggcacaggaagtgccaaatacgatgatcgtcgccatgctactgctcgcggcactctgcgtattaattgcgcttagtgccagttggctggcaccgaagataatgcatattgcccatgcgtttaccaatacccctcccgccactgtcgccagcggaatagcacttgtacccggcacgtttcatacacaggtcacccccagtttactgttgctgttactactggcgatgcctttgctgcctggcctttactggctgtggtgtcgtagccgccgcgcagcgtttcgtcgcacaggagatgcctgggcatgcggctacggctgggaaaatgcgatggccccgagtggcaatggcgtgatgcagccgctgcgtgtggtcttttctgcgctatttcgtctacgacaacagctcgaccctacgctgaggctaaataaaggtcttgcgcacgtcaccgccagggctcagagcacagaacccttctgggatgagcgggtgatccgccccatcgtgagcgccacccaacggctggccaaagaaatacagcatctgcaaagcggcgactttcgtctctattgcctgtatgtggtcgccgcactggttgtgctgctaatcgctattgccgtctaaggaaatcaccatgagacaaactctttgcgacggatatctggtcatttttgcgttagcacaggccgtgattctgctgatgctaaccccactttttacgggtatttcccggcagatacgcgcgcgtatgcactcccgccgcgggccggggatctggcaggattatcgcgatatccacaaactgtttaaacgccaggaagttgcgccgacatctagtggtctgatgttccgcctgatgccgtgggtattaatcagcagcatgctggtgctggcgatggccttaccactgtttattaccgtttccccttttgcgggcggcggcgatctgatcacccttatctatcttcttgccctgtttcgttttttctttgctctttccgggctggataccggaagtccgtttgcgggagtcggtgccagtcgcgagttgacgctcggcattctggtcgaaccaatgcttattctcagtctgctggtattggcgctgatagcaggttccacgcatatcgagatgatcagcaatacgctggcgatgggctggaacagcccgctaaccaccgtactggcgttactggcctgtggttttgcctgcttcattgagatgggaaaaattccctttgatgttgctgaagcagaacaggaattacaggaaggcccgctgaccgaatattccggtgccgggctggcgctagcgaaatgggggctggggctgaaacaggtcgtgatggcaagtctgtttgtggccctgtttctgccctttgggcgcgcgcaagaactttctctcgcctgcctgctgactagtcttgtcgttacgctgctcaaggttttgctgatttttgtactggccagtatcgcagaaaacacgctggcacgcgggcgttttttactcattcaccatgtgacctggcttggcttcagccttgctgcgcttgcatgggtcttctggttaaccggtctgtaaggagcactgacggaatatggaaaatcttgctctgacgacgttattgctgccttttatcggcgcactggtcgttagctttagcccacaacgtcgggccgccgaatggggggttttgttcgccgcgctgaccacgctgtgcatgttgagtctgatctccgcgttttatcaggccgataaagttgccgtcacgttgacgttggtcaacgtgggggatgtggcgttgtttggcctggtcattgatcgcgtgagtacgctgattctgtttgtggtggtgtttctcggtttgctggtcacgatctactccacgggttatctgacggataaaaatcgcgaacacccgcataacggcacgaatcgttattacgcatttttactggtgtttatcggcgcgatggcgggactggtactctccagcacgctgctcggtcagttgttgttttttgaaattacaggcggctgctcctgggcgttgatcagttattaccagagcgataaagcgcagcgtagtgcactaaaagcgttacttatcactcatatcggcagcttggggttgtatcttgccgccgccacgctgtttttgcagaccggaacgtttgcgcttagcgcgatgagcgagttacacggcgacgcacgttatctggtttatggcggcatcctgtttgccgcgtgggggaaaagcgcccagctaccgatgcaagcgtggctaccggacgcaatggaagcgccaacaccgatcagcgcctatctccacgccgcaagcatggtgaaagtgggcgtttacatttttgcccgcgctattatcgacggcggcaatatcccgcatgtgattggcggcgttggcatggtcatggcactggtcaccattctttatggctttctgatgtatttgccacagcaggatatgaagcggttgctagcctggagcaccatcactcaacttggctggatgttcttcggcttgagcctctccatcttcggcagccggctggcgctggagggcagcatcgcctacatcgtcaaccacgcgttcgctaaaagcctgtttttccttgtagcaggtgcgctgagttacagctgcggcacgcgcttgttgccgcgtctgcgtggcgtattgcacaccctgccgttgccaggcgtgggtttctgcgtggcagcgctggcgattaccggcgtgccgccgttcaacggcttcttcagtaaattcccgctgtttgctgccggttttgcgttgagtgtggagtactggatcctgctgcccgccatgattcttctgatgattgaaagcgtcgccagtttcgcctggtttattcgctggtttggtcgcgttgtgcctggcaaaccgagcgaggccgtcgccgatgccgcaccgctgccaggaagtatgcgcctggtgttgattgtactgattgtgatgagcctgatttccagcgtaatcgccgcgacctggttgcagtaaggagatgatgaatgaccggttctatgatcgtaaataatctggcgggactgatgatgctgacaagcctgtttgtgattagcgtcaaaagctatcgcctgagttgcggattttacgcctgccagagtctggtgctggtgtctattttcgccactctcagctgcctgttcgccgcagagcaactgctgatctggtccgccagcgcctttatcaccaaagtgctgctggtaccgttaatcatgacttacgctgcacgaaatattccccagaacatcccggaaaaagcgttattcggtccggcaatgatggcactgctcgcggcgttaattgtcctgctttgcgcatttgtcgttcagcccgtgaagctaccgatggctaccgggctgaaaccggcgctggcggtagcgttaggtcattttctgcttggcctgctgtgcattgtcagccagcgcaatatcctgcggcaaatttttggttactgcctgatggaaaacggctcccatctggtgctggcgcttcttgcctggcgagcaccggaactggtggaaataggtatcgctaccgacgccatcttcgccgtcattgtgatggtgttactggcaagaaaaatatggcgtacccacggcacgctggacgtgaacaacttgaccgcgctgaagggataatgagatgagttattctgtgatgttcgctttactcctgctcacgccgctgctttttagcctgctctgttttgcctgccggaaacggagactttctgcgactcgcacggtgaccgtattacatagcttagggatcacactgctgctgattctggcactctgggtggtccaaactgccgctgatgcaggagaaatattcgctgcgggactgtggcttcatattgatggtctgggcggtttgttcctcgccattcttggtgtgattggctttctcaccggtatttacagcattggctacatgcgtcatgaagtggcacacggcgagcttagtcccgttacgctgtgcgattactacggtttcttccatctgtttttgttcaccatgctgctggttgttaccagcaataacctgattgtgatgtgggcggcgatcgaagccaccaccttaagcagcgcgtttctggtaggcatttacggtcagcgtagtagcctggaagctgcatggaagtacatcattatttgtactgttggtgtcgcttttggtctgttcggtaccgtgctggtatacgccaacgccgccagcgttatgccgcaggcagaaatggcgatattctggagcgaggttcttaagcaaagctccttgcttgacccaacattaatgctgttggcctttgtgtttttgctaattggctttggtaccaaaaccgggctatttcccatgcacgcctggctgccggatgctcacagtgaagcgccgagtccggtcagcgccctgctctccgccgtattgctgaactgcgcgctgttggtgctgattcgctattacatcattatttgccaagccatcggcagcgatttccccaaccggttgttgctcatcttcggcatgttgagcgttgccgtggcggcatttttcattctggtacagcgggacattaagcgtctgctggcgtactccagcgtggagaacatggggctggtcgcggtggagctaggcattggcgggccgctgggaatttttgccgcgctgctgcacatcttaaaccacagtctggcaaaaacgctgctgttctgcggttccggcaatgtactgctcaagtacggcacgcgcgatctcaacgtcgtctgtgggatgctcaaaatcatgccatttaccgccgtgctgtttggcggcggtgcgctggcgctggcagggatgccgcccttcaacatttttcttagcgaatttatgaccattaccgccggactggcacgtaatcacctgctgattatcgtcctgctgttattgctgttaacgctggtgctggcgggcctggtacggatggctgcgcgggtgttaatggcgaaaccgccgcaggccgttaaccggggtgatctcggctggttgaccaccagcccaatggtgattctgctggtcatgatgctggcgatgggaacgcatattccacaacctgtcatcaggatcctggcgggcgcttccactatagtcctcagtgggacgcacgatctgcctgcacaacgtagcacctggcatgattttttgcctagtggcaccgcatctgttagcgagaaacacagtgaacgttaatagtagcagtaatcgtggcgaagcgattctcgccgccctgaaaacgcagttccccggcgcggtgctggatgaagagcgacaaacgcctgaacaggtcaccattacggtgaaaatcaatctgctgcctgacgttgtacagtatctttattatcaacatgatggctggcttccggtcctgtttggcaacgacgagcggacacttaacggtcattacgcggtttattatgcccttagtatggaaggggccgaaaaatgctggattgtggtgaaggcgctggtcgatgccgacagtcgggagtttccgagtgtcacaccgcgcgtccctgccgcggtctggggcgagcgagaaattcgcgatatgtacgggctgattccggttggcctgccggatcagcgtcgcctggtgttgcccgatgactggccggaagatatgcatccgctgcgcaaagatgcgatggattatcgactgcgccctgaaccgacgactgattccgaaacgtatccgtttatcaatgagggcaacagcgatgcgcgggtgatccctgtcggcccgctgcatatcacctccgatgaaccgggtcacttccgcttgtttgtggatggcgagcaaattgtcgatgctgattaccgcctgttttatgtccatcgcggcatggagaaactggcagaaacgcggatgggctacaacgaagtgaccttcttaagcgaccgcgtgtgtgggatttgcggttttgcccacagtgtggcctataccaatagcgttgaaaatgcactggggattgaggtgccgcaacgagcacatactattcgcagcattctgctggaagtcgaacggctacacagtcatttgcttaaccttggcctctcctgccatttcgttggttttgataccggctttatgcaatttttccgcgtgcgggaaaagagcatgacgatggcggaattgctgatcgggagccgtaaaacctacggtctgaatctgattggtggtgttcgccgcgatattctcaaagagcaacgtctgcaaacgctgaaactggtgcgcgagatgcgcgccgacgtgagcgagctggtagagatgctgcttgctacgccgaatatggaacaacgcactcagggcattggcattctcgaccgacaaatcgcccgtgatttgcgctttgatcacccctacgccgactacggcaatattccaaaaacactgtttacctttaccggcggcgatgttttctcccgcgtgatggtccgtgtcaaagagacgtttgatagcctggcaatgctggaatttgccctcgacaacatgccggataccccactgctgaccgaaggctttagctataaacctcacgcattcgcgctgggctttgttgaagcgccacgcggtgaagacgtgcactggagcatgctcggtgataaccaaaaattgttccgctggcgctgccgtgccgccacctacgccaactggccggtgttgcgttacatgctgcgcggcaataccgtttctgacgcaccgctgattatcggtagccttgatccctgctactcctgtaccgaccgtgtgacgctggtagatgtgcgcaagcgccagagtaaaaccgtgccgtataaagagatcgaacgctacggcattgatcgtaaccgtagcccgctgaagtaaggacagaagatgctgaagttactgaaaactattatgcgcgccggaaccgcgacggtgaaatatcccttcgcgccactggaggtcagccctggctttcgcggaaaaccggacctgatgcccagccaatgtattgcctgcggtgcctgcgcctgtgcttgtccggcaaatgcgctggctatccagaccgacgaccagcaaaatagccgcacctggcagctctatctggggcgttgtatttactgcggacgttgtgaagaagtgtgcccgaccagagccatccagcttaccaataactttgaactgaccgtcaccaataaagccgatctctatacccgcgcgacgttccatctacaacgttgcagccgttgcgaacgcccgtttgccccgcaaaaaaccatcgcactggctgctgaattgttagcacagcaacaaaatgcgccacaaaaccgcgaaatgttgtgggcgcaagcgagcgtctgcccggaatgcaaacaacgcgcgacgctgatcaacgacgatacagatgtactgctggtggctaaggagcagctatgagtccagtgcttacacaacatgtcagccagcccatcacgctggacgagcaaacgcaaaagatgaagcggcatttgctacaggatatccgtcgcagcgcttacgtttatcgcgtcgattgcggcggctgcaacgcctgtgaaatcgaaatttttgctgccattacaccagtattcgacgcagaacgttttggcattaaggttgttagtagtccgcgtcacgccgatattttgttatttactggcgcagtcacccgggcgatgcgtatgcctgcacttcgggcgtatgagtctgcccccgatcataaaatttgtgtttcctacggcgcgtgcggtgtcggcggcggtattttccacgatctctacagcgtctggggcggtagcgacaccattgtccccattgatgtttggatccccggctgcccgccaacaccggccgccaccattcacggtttcgccgtggcgctcggtttgctgcaacagaagattcacgctgtggattatcgcgatcccaccggggtgactatgcaaccgttgtggccgcagatcccgccaagtcagcgtatcgccattgagcgagaagcgcggcggctggcgggctatcgtcaggggcgagaaatttgcgatcggctcctgcgccatttaagcgacgatcctacaggaaatcgggttaacacctggttgcgcgatgccgacgatccacgtctcaatagtatcgttcagcaactctttcgcgtactccgggggttacatgactgaagagtgcggggaaattgttttctggacgctgcgaaaaaagtttgtcgccagtagcgacgagatgccggaacacagctctcaggtaatgtattacagcctagctatcggccatcacgttggcgtgattgattgtctgaatgtcgccttccgctgcccactgacggaatacgaagattggcttgcactggtcgaagaggagcaagcccgacgtaagatgctgggggtgatgacttttggtgagattgttattgacgccagccacaccgccctgttgacccgggcattcgcgccactggcggatgacgcgacgtctgtgtggcaggcgcgtagcattcaattcattcatctgttggatgaaattgtgcaggaaccggccatctatctgatggccagaaaaattgcgtgagaaggatttctcattaataaggactgttgatggctatgagtgacgaggcgatgtttgccccgccacaaggaataacaattgaagcggtaaacggaatgctcgcggagcggttagcacagaaacacggcaaggcgtctttattacgcgccttcatcccgctgccgccgccgttcagcccggtacaacttattgaactgcatgttctcaaaagcaacttctattaccgctaccatgatgatggcagcgatgtgacggcaacaacagagtatcagggcgagatggtcgattatagccgtcacgccgtccttctcggcagtagtggaatggcggagctacgctttattcgcacccacggcagtcgttttacttcccaggattgcacactgtttaactggctggcgcggataatcaccccggttctgcaaagttggctcaatgatgaagaacagcaggtggcgctgcgtttgctggagaaagatcgcgatcatcatcgggtactggttgatattactaatgcagtgctgagtcatcttgatctcgacgatctgatcgctgacgtcgctcgtgagatccatcattttttcggtctggctagtgtcagtatggtactgggcgatcatcgaaagaacgagaagttcagcctgtggtgcagcgatctttctgccagtcattgtgcgtgtctgccacgctgtatgcctggcgaaagtgtattgctgacacaaacgctacaaacccgacaaccgaccttgacgcaccgtgcagatgatctgtttctctggcaacgcgacccgttattactcttacttgcatctaacggctgcgaatctgcgctccttataccgcttacctttggcaaccatacaccgggtgcattgttgctggcgcatacctcttccactctctttagtgaggaaaactgccagctactacaacacatagccgatcgcatcgctattgccgttggcaatgccgatgcctggcgtagcatgaccgatttgcaggaaagtttgcagcaagaaaaccaccagcttagcgagcagctccttagcaatctgggcatcggtgacattatctatcaaagccaggcaatggaagacctgctccagcaggtagatattgtggcgaagagcgacagtacggtgttgatttgtggtgaaaccggaactggcaaagaggtgatcgccagagcgatccatcaacttagcccgcgacgcgacaagccgctggtcaaaatcaactgcgctgccatccccgccagtcttctggaaagtgagttattcggtcatgacaaaggggcgtttactggtgcgattaatacccatcgtggtcgttttgaaattgccgatggcggcacgttgtttctcgatgaaattggcgatctgccgttagaacttcagcctaaactgctgcgcgtattgcaggagcgggagattgagcgtctcggcgggagtagaacgatcccggtgaatgtcagagtcattgccgccaccaaccgtgatttgtggcaaatggttgaagatcgccagtttcgcagcgatctcttttatcgcctgaatgtcttcccactggaattgccgccgctacgcgaccgtccggaagatatccctcttttagcaaaacatttcacgcaaaaaatggcgcgccatatgaatcgcgcaattgacgccatcccgaccgaggcactacgccagttgatgagctgggattggccgggcaacgtgcgcgagctggaaaacgtgattgagcgggcggtactgttgactcgtggtaacagtctgaatttacatctaaatgtccgacaaagccgtttactgccgacgctaaatgaagatagtgcgcttcgcagtagtatggcgcagttactgcacccgacgacgccagagaatgacgaagaagaacgtcagcgcattgttcaggtattgcgagaaaccaatggcattgttgccgggccccgtggcgcagcgacgcgattagggatgaagcgcaccacgctgctgagtcgaatgcagcggctggggatcagcgttcgcgaggtgttgtaatctgcttttgcaggagtatgcatgagaaacaaactctctttcgacttgcagttgagcgccagaaaagcggcaatcgctgaacggattgccgcccataaaattgcccgcagtaaagtgagcgtctttttaatggcgatgtccgctggcgtgtttatggcgatcggatttactttttacctttccgttatcgccgatgccccgtctagtcaggcattaacccatctggtgggcggcctttgctttacactcggctttattttgctggcggtttgcggcaccagcctgttcaccagcagcgtaatgacggtgatggcaaaaagtcggggcgtcattagttggcgaacttggctgattaacgcacttctggtggcctgcggtaatctggcaggtattgcctgtttcagtttgttaatctggttttccgggctggtgatgagtgaaaacgcgatgtggggagtcgcggttttacactgcgccgagggcaaaatgcatcatacatttactgaatctgtcagcctcggcattatgtgcaatctgatggtttgcctggcgctgtggatgagttattgcgggcgtagcttatgcgacaaaatcgtcgccatgattttgcccatcaccctgtttgtcgccagtggctttgagcactgtatcgccaatttgtttgtgattccgttcgccattgccattcgccatttcgcccctccccccttctggcagctggcgcacagtagcgcagacaattttccggcactgacggtcagccattttattaccgccaatctgctcccggtgatgctgggtaatattatcggcggtgcggtgctggtgagtatgtgttatcgggctatttatttacgtcaggaaccctgaaaaatcagcccggcgaaacagttcgtcgggctgaagattattcttgcgcgatttgcccatcgggccaggcatgaatcacggctttgatcagcgtcgccaacggaatggcgaagaatacgccccagaatccccacaaaccaccgaagatcaccacgcttaaaataatcaccagcggatgcaggttaaccgcttcggagaacaacaccggcactaacaggttgccgtccagcgcctgaataatcagatacaccgcgaagcagctccagaattcagtacctgcgccaaactggaatagcgccacgccaaccaccggaatggtcaccacaaatgcgccaatgtacggaataagaacgctgaagccgaccagcactgccagcagcaggctatagttcagcccgaagagcaagaaccccagccaggtggcgatccccaccacgatcatctccagcactttgccgcggatatagttggtgatttgttgattcatctccttccacacctgtcctgccagcccacggttacgcggcagcacccggcgaacggcgttcagcatctgctctttgtctttcagcaggaagaagaccatcaatggcaccagcaccagatagacggctatggtcagcaaaccgaccaggctggcgagggaaattttcaccacgctatcgcccatggtcagcatccgactgcgcatattttcggccattgcatcaataatgcccgcgtccattaacgccggatagcggcgcggcaacgtggcggcaaagtcagaaagcttattgagcatccccggcatatcgcggattaagtagatgccctgttgccaggcgataggcagtaccacgaacgccatcagtagcaatataccgacgaaaaccaccaatacaatgctcgtcgcccagcggcgggagcagccaatagattgcagacgcacggttggccattccagcaaataggccagcacaatagccaccagcaacggagcaagcaggccactaaagaaaaagataatgccaaatccggcaactaaaataaccagcaaggcaatcgcttccgggtcgctaaaacggcggcgataccattgcatcaacatttcgagcataaagaccttccctgaacctcaagagcgggattgcgatccgcaattgtatcgaaatgtcacaaaaaagacttcgctttttatgacggattcaggaaactgaaaagtcatttgagtgggctaatcttcgccgttacactcaaaggcggcgcggtgggaacgatatttcacagtatcggtcaaatgactatctccagaaatacaggatagaggttatgttcaggcagttgaaaaaaaacctggttgcaaccctcattgctgctatgaccattggtcaggtagccccggcgtttgccgacagcgcagacaccttgccggatatgggaacctccgcaggaagcacgctttccattggtcaggaaatgcagatgggcgactattatgtccgccagctacgcggcagcgcgccgttaattaatgacccgctgttaacgcaatatattaatagcctggggatgcgtctggttagccatgccaatagcgttaagacaccgtttcatttttttctgatcaacaacgacgaaattaacgcctttgctttctttggcggcaacgtggtgctgcactctgccctgttccgttattccgataacgaaagtcaactggctagtgttatggcgcacgaaatctcccacgtcacccaacgtcacctggcgcgagcgatggaagatcagcagcgcagcgcgccgctgacctgggtcggcgcgttaggttctattttactggcgatggccagtccgcaggcggggatggcggcgctgaccggtacactggcgggaacgcgtcaggggatgatcagtttcacccagcaaaatgaacaggaagcggaccgcattggtattcaggtgctgcaacgcagcggattcgatccgcaggcgatgccaaccttcctcgaaaaattactcgatcaggcgcgttactccagccgcccgccggaaattttattgactcacccgttgccggaaagtcgtctggcagatgcccgcaaccgtgctaatcagatgcgcccgatggtggtgcagagcagcgaagatttctatctggcgaaagcgcgcacactggggatgtataattccggacgtaaccagctcaccagtgatttgctggatgaatgggcgaaaggaaacgttcgtcagcaacgagcagcacaatatggtcgtgctttacaggcgatggaagccaataaatacgacgaggcgcgtaaaacgctgcaaccgttactggcggcagaacctggcaacgcatggtatctcgatctggctactgatatcgatcttgggcaaaacaaagccaatgaggcgatcaatcgtctgaaaaatgcccgcgatttacgcaccaatccggtgttgcagctcaacctggcgaacgcttatttgcaaggcggtcaaccacaagaagcggccaatattctgaatcgctacacctttaataataaagatgacagcaacggctgggatttgctggcacaggcggaagccgcgctaaataaccgcgatcaggagctggctgcgcgagcagaaggttatgcgctcgccggacgactcgatcaggccattagcctgttgagtagcgccagtagccaggtgaaattaggcagcctgcaacaagcgcgttacgatgcgcgcatcgaccagttgcgccagctgcaggaacgctttaagccttataccaagatgtaattcgcattaaaggaagaacaatgaccaaacaggtaaaaatctaccataacccacgctgtagtaagagccgggaaacgctgaacctgctgaaagaaaacggcgtggagccagaagtggtgctctaccttgagacacccgccgatgcggcaacgctgcgcgatttgctgaaaatactggggatgaatagcgcccgtgaattgatgcgccagaaagaggatctttataaagaactgaacctggctgacagtagccttagcgaagaggcgctgattcaggcaatggtggataatccgaagctgatggagcgcccgattgtggtcgcgaatggcaaagcgcggattggtcgtccaccggagcaggtactggaaatcgtgggttaagatgtgctccatcgctagttgaagcacattgccggatgcgacgcttgccacgtcttatccggcctacgaatactatggattaacttcgcgtagttcggataaggcgttcgcgccgcatccgacaataaacaccttatttacaacttcagaatttctttcacaaacggaatggtcagcttacgttgcgcggtaatgctcgcacgatccaactgatccaacgtcataaatagcgtgcgcatttctctgtcgagccgcttcagcaagaaacgccccacatcttccggcagttcaaaaccacgcaaacgcgcgcgtaactgtagcgcctgcaacttatcttcatcagaaagtggctgcaatttgtagatctgcccccagtcgagtcggctcgcgagatccggtaatcccagattcaactgccgcggtggacgatcgccggtgatcaacaaccgtgttttgccgctttccagaattcgattgtagagatcgaaaatcgccatctcccacaactcatcgcctgcaatacactcaatgttgtcgatacagaccaggctcaaatgctccataccgtcgagcacttccggaacaaaccaggtgcgtttatccagcgggacatagcccaccgcatcgccacgctggctcaattccgcgcaagccgcgtgcagcagatggctgcgccccgcgccttcgcgtgcccagagatagatgtaaccgctatgttcctgacgcagcacgttttgcagcgcggccagtaaagaggagttatcccccggccagaaacttgcaaaggtttcgtcgtcaggaagataaagtggcaaagagagctgtgccggtgtgttcagagatacctcaaccaggatttcacaaaatcggctgaagtttaccacagaatcccatgatgtttgaaccgggcagcaacactgcccggtcggtacattatttgtctgttatatccgcgtcttctgcgtccagcaccacttcttcagggcgcagcacactgatcagtttgaagatcaaacttaagccgataccgacgatggtcgccagcgccataccttttaactccgccgcgccgatgtttaccttcgcgccactgacgccgatgatcaaaatcacggaagtcaggatcaggttctgtgctttgttgtaatccactttgctttcgatcaaaacacgaataccggaagcaccgatgacaccataaagcagcaggctaacgccgcccatcaccggcaatgggatcatctggatagcggcagccagtttaccgacgcaggaaagcaggatagcgaaaatcgccgccccgccgataacccaggtactgtaaacacgggtgatcgccatcacgccaatgttttctccgtaagtagtatttggcgtagagccaaagaagccggaaatcacggtgctcaagccattagcaaacatgctacggtgcagacctggatcgcgcagcagatcttttttgacgatattagccgttactaccaggtgccctacgtgttcggcaataaccactaacgccgctggcagaatagtcagaatggcaaaccactcgaagcgcggcgtatagagggttggcagcgcaaaccagtgagcattaataatcggcgtggtatcgacaattcccattgcgaaagagagcgcgtaccccaccagcacgccaattaaaatcgggataattgccaggaaaccacgaaacagcacggaacctaaaaccgtgaccgccagggtggtaatagagatgatgatggttttggagtctggcgtttgcccttcagccgggagtaaacccgccataccggcagctacgcccgccagctccagaccgatgacggcaacgattgcgcccattgccgcaggtggaaacagcacgtccagccagccggtccccgctttcttcacgataaaagaaaccaggcagaacagcacgccgcacataataaagccgcccagcgcgacttcataccctaacggcaacagtaacaataccggactaataaaggcaaagctggaaccaagataagccggaattttccctttacagatgaagagatacagcagcgttccaataccgttaaataacagtacagtcgccgggttaatatgaaataagacgggcaccaggacggttgcaccaaacatggcgaacaaatgttgcaaactaagcgggattgtctgtaaaagtggcggtctttcactcaccccgatagcacggcgcgtcatagtattatcctctgtattatgtgttataggcgctttactcaaaaaaaagccgactcttaaagtcggctttaattatttttattctttatttcgtaccaaagattttgtcaccggcatcgccgaggcccggaataatgtatccgtgctcgttcagtccctgatcaatgcttgcggtatacagttcgacgtccgggtgcgctttttccagcgcagcgataccttctggcgcagctaccagcaccagaactttgatgctgctgcagcccgcttttttcagcaggtcgatggtcgcgataacggaaccaccggttgccagcattgggtcaacgatcagcgccatacgctcatcgatgttagaaaccagtttctggaagtacggtaccggctccagcgtttcttcattacggtacataccgacaacgctgatgcgcgcgctcggaacgttttccagcacaccgtccatcataccaagacccgcacgcagaattggcacaacggtaattttcttacctttgatctggtcgatttctaccgggccgttccagccttcgatagttactttttccgtttcgaggtcggcggtcgcttcgtaagtcagcaggctacccacttcggaagcgagttcgcgaaagcgcttggtgctgatatcttgctcacgcatcagtcccagcttgtgtttgacgagtgggtgtttgacttccacgatcttcatactctttctcctttgaggggcagccacaaaaaaaatcgacggattatacctcctttcttcaaggcggcaatattcttttcgttgactttagtcaaaatgataacggtttgagataaagttattttatattcagatggttatgaaagaagattattccatccgaaaactaacctttaccctggcacaagtcttctttcgccgcgcgcctggggaaaagacgtgcaaaaaggttgtgtaaagcagtctcgcaaacgtttgctttccctgttagaattgcgccgaattttatttttctaccgcaagtaacgcgtggggacccaagcagtgaccgataaaacctctcttagctacaaagatgccggtgttgatattgacgcgggtaatgctctggttggaagaatcaaaggcgtagtgaagaaaacgcgtcgtccggaagtgatgggcggtctgggcggcttcggtgcgctgtgtgcattgccgcaaaaatatcgtgaacccgtgctggtttctggcactgacggcgtaggtaccaagctgcgtctggcaatggacttaaaacgtcacgacaccattggtattgatctggtcgccatgtgcgttaatgacctggtggtgcaaggtgcagagccgctgtttttcctcgactattacgcaaccggaaaactggatgttgataccgctagtgcggtgatcagcggcattgcggaaggttgtctgcaaagtggctgtagtctggtgggtggcgaaacggcagaaatgccggggatgtatcacggtgaggattacgatgtcgcgggtttctgcgttggcgtggtagaaaaaagtgaaatcatcgacggctctaaagtcagcgacggcgatgtgctgattgcactcggttccagcggtccacacagcaacggctatagcctggtgcgcaaaattcttgaagtcagcggttgtgatccgcaaaccaccgaacttgatggtaagccattagccgatcatctgctggcaccgacccgcatttacgtgaagagtgtgctggagttgattgaaaaggtcgatgtgcatgccattgcgcacctgaccggcggcggcttctgggaaaacattccgcgcgtattgccagataatactcaggcagtgattgatgaatcttcctggcagtggccggaagtgttcaactggctgcaaacggcaggtaacgttgagcaccatgaaatgtatcgcaccttcaactgcggcgtcgggatgattattgccctgcctgctccggaagtggacaaagccctcgccctgctcaatgccaacggtgaaaacgcgtggaaaatcggtatcatcaaagcctctgattccgaacaacgcgtggttatcgaataatgaatattgtggtgcttatttccggcaacggaagtaatttacaggcaattattgacgcctgtaaaaccaacaaaattaaaggcaccgtacgggcagttttcagcaataaggccgacgcgttcggccttgaacgcgcccgccaggcgggtattgcaacgcatacgctcatcgccagcgcgtttgacagtcgtgaagcctatgaccgggagttgattcatgaaatcgacatgtacgcacccgatgtggtcgtgctggctggttttatgcgcattctcagcccggcgtttgtctcccactatgccgggcgtttgctgaacattcacccttctctgctgccgaaatatcccggattacacacccatcgtcaggcgctggaaaatggcgatgaagagcacggtacaagcgtgcatttcgtcaccgatgaactggacggtggcccggttattttacaggcgaaagtcccggtatttgctggtgatagcgaagatgacatcaccgcccgcgtgcaaacccaggaacacgccatttatccactggtgattagctggtttgccgatggtcgtctgaaaatgcacgaaaacgccgcgtggctggatggtcaacgtctgccgccgcagggctacgctgccgacgagtaatacccccgtaattaaagcgccagctctgccgctggcgtttttcaattcacctgtaaatcgcaagctccagcagtttttttcccccttttctggcatagttggacatctgccaatattgctcgccataatatccaggcagtgtcccgtgaataaaacggagtaaaagtggtaatgggtcaggaaaagctatacatcgaaaaagagctcagttggttaagcttcaatgaacgcgtgcttcaggaagcggcggacaaatctaacccgctgattgaaaggatgcgtttcctggggatctattccaataaccttgatgagttctataaagtccgcttcgctgaactgaagcgacgcatcattattagcgaagaacaaggctccaactctcattcccgccatttactgggcaaaattcagtcccgggtgctgaaagccgatcaggaattcgacggcctctacaacgagctattgctggagatggcgcgcaaccagatcttcctgattaatgaacgccagctctccgtcaatcaacaaaactggctgcgtcattattttaagcagtatctgcgtcagcacattacgccgattttaatcaatcctgacactgacttagtgcagttcctgaaagatgattacacctatctggcggtggaaattatccgtggcgataccatccgttacgcgctgctggagatcccaagtgataaagtgccgcgctttgtgaatttaccgccagaagcgccgcgtcgacgcaagccgatgattcttctggataacattctgcgttactgccttgatgatattttcaaaggcttctttgattatgacgcgctgaatgcctatagtatgaagatgacccgcgatgccgaatacgatttagtgcatgagatggaagccagcctgatggagttgatgtcttccagtctcaagcagcgtttaactgctgagccggtgcgttttgtttatcagcgcgatatgcccaatgcgctggttgaagtgttacgcgaaaaactgactatttcccgctacgactccatcgtccccggcggtcgttatcataattttaaagactttattaatttccccaatgtcggcaaagccaatctggtgaacaaaccactgccgcgtttacgccatatttggtttgataaagcccagttccgcaatggttttgatgccattcgcgaacgcgatgtgttgctctattatccttatcacacctttgagcatgtgctggaactgctgcgtcaggctagcttcgacccgagcgtactggcgattaaaattaacatttaccgcgtggcgaaagatagtcgcatcatcgacagcatgatccacgccgcacataacggtaagaaagtcaccgtggtggttgagttacaggcgcgtttcgacgaagaagccaacattcactgggcgaagcgcctgaccgaagcaggcgtgcacgttatcttctctgcgccggggctgaaaattcacgccaaactgttcctgattagtcgtaaagaaaacggtgaagtggtgcgttatgcacacatcgggaccgggaactttaacgaaaaaaccgcgcgtctttatactgactatagcttgctgaccgccgatgcgcgcatcaccaacgaagtacggcgggtatttaactttattgaaaacccataccgtccggtgacatttgattatttaatggtaagcccgcaaaactcccgccgcctattgtatgaaatggtggaccgcgagatcgccaacgcgcagcaagggctgcccagtggtatcaccctgaagctaaataaccttgtcgataaaggcctggttgatcgtctgtatgcggcctccagctccggcgtaccggttaatctgctggttcgcggaatgtgtagcctgatccccaatctggaaggcattagcgacaacattcgtgccatcagtattgttgaccgttaccttgaacatgaccgggtttatatttttgaaaatggcggcgataaaaaggtctacctttcttccgccgactggatgacgcgcaatattgattatcgtattgaagtggcgacgccgctgctcgatccgcgcctgaagcagcgggtactggacatcatcgacatattgttcagcgatacggtcaaagcacgttatatcgataaagaactcagtaatcgctacgttccccgcggcaatcgccgcaaagtacgggcgcagttggcgatttatgactacatcaaaagtctcgaacaacctgaataaccctatgccaatacacgataaatcccctcgtccgcaggagtttgctgcggtcgatcttggtagtaacagttttcacatggtcatagcccgtgtggtagatggtgccatgcagattattggccgcctgaaacagcgggtgcatctggcggacggcctggggccagataatatgttgagtgaagaggcaatgacgcgcggtttaaactgtctgagcctgtttgccgaacggctacaagggttttctcctgccagcgtctgtatagttggtacccatacgctgcgtcaggcgctgaacgccactgactttctgaaacgcgcggaaaaggtcattccctacccgattgaaattatttccggtaatgaagaagcccgtctgatttttatgggcgtggaacatacccaaccggaaaaaggtcgcaaactggttattgatattggcggcggatctacggaactggtgattggtgaaaatttcgaacctattctcgttgaaagccgccggatgggttgtgtcagctttgcccagctttattttcctggcggggtcatcaataaagagaattttcagcgcgctcgcatggcggcagcacaaaaactggaaactttaacctggcaattccgtattcagggctggaacgttgcaatgggcgcttccggtaccataaaagccgcccatgaagtgttaatggaaatgggcgagaaagacgggataattaccccggaacgtctggaaaaactggtaaaagaagttttacgtcaccgtaatttcgcaagcctgagtttaccgggtctttccgaagagcggaaaacagtcttcgttccgggactggcgattttatgcggtgtgtttgatgctttagccatccgtgaactgcgcctttctgacggggcgttacgcgaaggcgtactgtatgaaatggaaggacgtttccgtcatcaggatgtgcgtagtcgcaccgccagcagcctcgccaaccagtatcacatcgacagcgaacaggcccgacgggtgctggataccactatgcaaatgtacgaacagtggcgggaacagcaaccgaagctggcgcatccgcaactggaggcgctactgcgatgggccgccatgctgcatgaggtcgggttgaatatcaaccacagcggtttgcatcgccactccgcttatattctgcaaaacagtgacttgccgggttttaatcaggaacagcagctgatgatggcgacactggtgcgctatcaccgtaaagcgattaagctcgacgatctaccgcgctttaccttgtttaagaagaaacagttcctgccactgatacagctattgcgccttggcgtattactcaacaatcaacgtcaggcaaccaccacaccgccaacattgacgctgattactgatgacagtcactggacactgcgtttcccgcatgactggtttagtcagaatgcgctggtactgcttgatctggaaaaggagcaagaatactgggaaggcgtggctggctggcggttgaaaattgaagaagaaagtacaccagaaatcgccgcttaatactttgcgggccgacgagaaatgtcggcccgcattattcaggcactttcgcgaatgggttcgatttcattcagcgtatcaattaacggctgcggcttaccaataagataaccctgcatataatcgatccccaaagagagcaccgcctcgcggatctcttcgttttcaacgtactctgccactaccagcattttcttcattcgcgccaggtggcaaatgcttgccactatctgataatccagactattactcacaatattgcggataaaactgccgtcaattttaagcagatcggcattcacatttttaagccgcgcatagctggcgtagccggtgccgaaatcatcaatcgcaatctggcagcctaattcctgaagatgctgcaaggtgatttgcgcctgcttaacattggtcagagcattactttcggtgacttcaaaaataagttgccacgcttcaatctgatatttagccagcaactgactgacttcaacaggaaaacgagcctgacatacgctggttggagacagattaatagcaaaacggtgagcgggcatcttcgctctgttttcagccataaattgcagcgtatgctcaatgacccacatgtcgatactgctgcttaaaccaaattcgtgcgcgaccggcaagaagctatcggggctgatcagttcatcattctcacctttcatgcgcagaagaatttcatggtaaacatcaccacgcataccggtaatcggctgggccatcaggaaaaaatggttgtgttccagcgcctgctgtagtcgattcatcatcgcgactttatctttcaattcgcgttgcaaatacattgccccgcgacgctgcatattttccggggcgttggtcacgatggaaagttcggcgaccgtatttagctctcccagcagcaggtagatatgattcactgggctgcgcacatagcagtaactgacgccaatctgcggttgcatcggcatgccatcccaaaagaaacgaaattgcttgagatggctatccagtgcggtaatgcgctcctggtggctttctgtattcagtcgcagcgcgagatcgttaccgctaagctgataaacatcttcacccggttccagcaagggactcagccagtgagaaagtttttgcttgtattgaatccgcagcatgatgccatagttcttaaccagcatttccatgccagggatgcgtaaataacaaagcgcagaccagggggcatcacgcaacgcgcgattcagggcgcgaacatttggcagatgaaccaccgggtccacatacgcaagccgctgaatgcgtctgactaccgctctctgacgggttgccagtacagccatataattgacaataaaagagaataccagataactggaggaggttatggtcagctgcgtggtatagccaggataaatgggaatgtaattttgatagctgtggatgctgatcatcaacacgaccgcccagagcaggctaatcagcttataaccatagcgcatcgctccccacatcatcaggggcagcaataaactcaaggtataattggtgctaaaaattgtgcttttttcatttaacggcatgcataacagcaacaataaagcacctaatgccagtagccagagcgcgaactcttttttggtgactttggcatcaacctgctgttttaattggctataatagctacgtaaataaaatggatttcgcactacccgaatgatgaagtagcacagcgggacaccgatcagattacccaccagtaaggcctgataattgattaaagtcccgaggttaaaaggcatgacaccgaccagattttctctgctcgccagtaatcctacaaatgcagcaaactggaaaagtatcagaaacagcgttgcaggaaacacaatctgccagaatatacgctgggaaattaaacgggtatcaccatgactaacgttgttacgccggggagtaaagaccctgtaaccgccccaacagagaatgataatgataataaaattagccgttaaacttagcgtttcgtaaaaacccagctctgcatatttgcggacaaaaatccctaaggcgatccctggcaatgccgcccagctgaaaaacatcatcatgctgatcatcagtgccagaggcagataaaagagaaaaacctcaccggaagaaatatgcgcgaaagtattaatgtgggcgaaaatgggcaagattaaagaaggcaggaacagcggaagcccccaccatttatcacgtatttttatataagttgcattcagtttcatagatgctcagcagaatcccccacatcctgaaggaggtgtattcagacaggcatcccacctgacttcgaatgatgattattcatcactatagagagcattgattctaagtgtcatatgaaagtaccaattgatatatatcaaacaaaataaccctgattaatgaattattacgtttatcatgttaattcatcattattacatcatcattgtaaataattaaattaacttccataacattaaaatatgtatccactgacgcttttttacataacgaagaattgaccattttgtcctgttgtgccttaatgtaagtaccgtccacagcgtgggacatacttcaaggaaccttttgtgagtcaggcaaccagtatgcgaaaacgacaccgatttaacagtcgcatgacccgtatcgtactgctcatcagctttatcttcttctttggccgttttatctacagctccgtcggtgcctggcagcaccatcagagcaaaaaagaagctcagcaatccacactctccgtcgaaagtccggtacaacgttaacggttaccttctccactttcacagaacataacggcacttcgctgtcggatgcttttgctgtttgggattatcaaagcggcagatattctttcatcttaaattttacgtctttatcctgactgatgtttatcctgtttggctgcgaaataaatataaaattaatatatatgttgtaatgatatatttttataaattattccctgcgtgaattttaataaatttaatctatccctttatacgcaatacatttactttcctcttttgatgatcttaaatgtcttatttttcgtaatgtgtataacaaggaatagtgatgaaatttaaaaaatgtcttctgcctgtggcaatgttagcgagtttcactctggcaggatgccagagtaatgctgacgatcatgctgccgatgtttatcaaaccgatcaactgaataccaaacaagaaactaaaaccgttaatattatttccattcttcccgcaaaagttgccgtagacaactcccaaaataaacggaacgcacaagccttcggcgcgcttattggcgcagtcgctggcggtgttatcggccacaacgtcgggtctggcagcaattccggaacgacggcaggtgcagttggcggcggagctgtaggcgcggcagcgggttctatggtgaatgataaaaccttagtggaaggtgtttctttaacctataaggaaggcaccaaagtgtatacctctacccaggtgggtaaagagtgccagtttacgacaggtttagccgttgttattaccacgacgtataacgaaacgcgtattcagccaaataccaaatgtcctgaaaagagctaataatcaggaggagtcatgaagaaagtttttctttgcgccatcttagcctccttaagctatccggctatcgccagtagtttgcaggatcaactctctgctgtcgcagaagcggaacagcaaggtaaaaatgaagagcaaaggcagcatgacgaatgggtcgcggagcgcaacagggaaatccagcaagagaagcaacgtcgcgcaaatgcccaggccgccgctaacaaaagagcggcaacggcagcggcaaataagaaagctcgtcaggataaactggacgccgaagcctctgcggacaaaaaacgcgatcaaagttatgaagatgagctacgcagcttagagattcagaaacaaaaactggcgctggcgaaagaagaagcccgcgttaagcgagaaaacgaatttatcgatcaggaactgaagcacaaagctgcgcaaaccgatgtggtgcaatctgaagctgacgccaacagaaatatgactgaaggcggtcgcgatctgatgaaaagcgtgggcaaagcagaagagaacaaaagcgacagctggtttaattaatcgatgttagtaacttcaatcctataattcttgaagataaaaaaccctctgtagtaacagagggttttgttcattcatagtgcagggtcaaatcattcccactcaatggtagctggcggcttgccgctgatgtcatacaccacgcgggaaataccgttcacttcattgataatgcggttggaaacgcgaccgaggaaatcgtacggcagatgcgcccagtgtgcggtcataaagtcgatggtttcgacagcacgcagagagacaacccagtcatacttacgaccatcgcccattacgccaacggaacgtaccggcaggaacacagtgaacgcctggctgactttgtcgtacaggtccgctttacgcagttcttcaatgaagatggcgtcagcacggcgcagcaggtcacagtactctttcttcacttcacccagaacacgaacgccaaggcctggtcccgggaacgggtgacggtacagcatgtcgtacggcaggcccagctccagaccaatcttacgcacttcgtctttgaacagctctttcagcggttcaaccaggcccatcttcatctctttcggcaggccgcccacgttgtggtgagatttgatgacgtgtgctttaccggttgcagacgccgcagattcgataacgtcagggtagatggtgccctgcgccagccacttcacgtcttccagtttcagcgcttcttcatcgaatacttcaacgaaaacgcgaccgatgattttacgttttgcttccggatcgttttcgccagccagcgcactcaggaagcgatcttctgccggtacgtgaacaatgttaagaccaaagtgatcgccaaacatatccagaacctgctctgcttcgttgaggcgcagcaggccgttgtcgacgaatacgcaagtcaggtttttaccgatagcgcggtgcagcagcattgcggttacggaggaatccacaccaccagagaggccgaggatgactttatcgtcgcctacctgctcgcggatgcgagctacagcatcgtcgataattttcgctggcgtccacagggcttcacactggcagatatcacgcacaaaacgctccagcatgcgcataccctggcgggtatgagtcacttccgggtggaactgtacgccatagaagcgtttttcttcgttagccataatggcaaacgggcagctttcggtgctggctacggtgatgaagtcggacggaatagcggtaactttatcgccgtggctcatccagacatcgagcagcggtttaccgtctgcggtcagcgcatcttcgataccgcgaaccagtgcgctgtcgtttacgacttcaacctgcgcgtagccaaattcacgttcgttagaggcttcaacgtgaccgcccaactgcattgccatggtctgcatgccatagcaaacgccgaataccggtacgcctgcttcaaagacatactgcggcgcacgcggactgttttcttcagtagtactttccgggccgccggaaagaataatgccgcttggattgaagtcacgaatttgtgcttctgtcacatcccacgcccacagttcgcagtaaacacccagctcacgcacgcggcgcgcaaccagttgagtgtactgagaaccgaagtccagaatgaggatgcgatgcttatgaatgttttccgtcattgacgcttattccgaggcaagtgaaacagataatataaatcgcccgacatgaagtcgggcgaagagaatcaggagcccagacggtagttcggggactctttagtaatggtcacgtcgtgaacgtggctttcctgaatgcccgcaccgctgatacgtacaaactccgctttagtacgcagttcgtcgatagtaccacagccggtcagacccatacaggagcgcaggccgcccatctgctggtgaatgatctctttcaggcgacctttataggctacgcgaccttcgataccttccggcaccagtttgtcggcagcgttatcgctctggaaataacggtcagaggaacctttggacatcgcgcccagggaacccataccacggtaagatttgtaagaacggccctggtagagttcgatttcacccggagattcttcagtacccgccagcatggaacctaccatcaccgcgcttgcgccagcggcgatagctttggcgatgtcgccggagaagcgaataccgccatcagcgataaccggaataccggtgccttccagggcttctactgcgtcagcaacagcggtaatctgcggaacaccgacgccagtcacgatacgagttgtacagatagagccagggccaatgccgactttaaccgcactgcaaccagcttctgccagagcgcgtgcacctgcagctgttgccacgttgccgccgataatttgcagatccggatatttagcacgggtttcacggatacgttgcagtacaccttcactgtgaccgtgggaggagtcgatcagcagaacgtcaacgcctgcggcaaccagcgcgtcaacacgctcttcgttacccgcacctgcgccaaccgctgcaccaacacgcagacggccttgctcgtctttacaggcgttcggtttacgttccgctttctggaagtctttcacggtgatcatgccgatcaggtggaattcgtcatcaaccaccagcgctttttcaacgcgtttttcgtgcatttttgccagcaccacttcacgggcttcaccttcacgcacggtgaccagacgctctttcggcgtcatgtaaacgctaaccggctggttcaggtcggtaacaaaacgcacgtcacgaccggtgataatacccaccagttcgttttcttcggtaacgaccggatagcccgcaaaaccgttacgctcggtcagttctttcacttcgcgcagcgtcgtggttggcagaacagtctgcggatcagtcaccacaccagattcgtgttttttcacacggcgaacttcttctgcctggcgttcaatggacatgtttttgtggataaagccgataccgccttcctgagccagagcaatagccaggcgcgcttccgttacggtatccattgctgcggaaagcatagggatattcagacgaatagttttcgtcagctgggtgctgaggtcagcagtattcggcagaacggtagagtgagcaggaacgaggagaacgtcgtcaaacgtcagagcttctttagcgatacgtagcatgggcaatatctcgaccagagtggttaataaatattgccgcggcattatacagagcgtaaccgattgcatctacccctttttgcaaaaaatgcttgctatccccgaagggcgggttactatcgactgaataacctgctgatttagaatttgatctcgctcacatgttaccttctcaatcccctgcaatttttaccgttagtcgcctgaatcaaacggttcgtctgctgcttgagcatgagatgggacaggtttggatcagcggcgaaatttctaatttcacgcaaccagcttccggtcactggtactttacactcaaagacgacaccgcccaggtacgctgcgcgatgttccgcaacagcaaccgccgggtgaccttccgcccacagcatgggcaacaagttttagttcgcgccaatattacgctctacgagccgcgcggcgactaccagataatcgttgagagtatgcagccggccggtgaagggctgctgcaacagaagtacgaacagctcaaagcgaagttgcaggctgaaggtttgttcgatcagcaatacaaaaaaccacttccctcccctgcgcattgcgttggtgtgatcaccagtaaaaccggtgctgcgctacatgatattttgcatgtgttaaaacgtcgcgatccttctctgccggtgatcatctaccctgccgccgttcagggcgatgacgcgccggggcaaattgttcgcgccattgaactggcgaatcagcgcaatgagtgcgacgtattgatcgtcgggcgcggcggcggtagcctggaagatttatggagttttaacgacgaacgcgtagcgcgggcgatttttaccagccgcattccggttgtcagcgccgtcgggcatgagacggatgtgaccattgccgattttgttgccgatctgcgtgcgccaacgccgtctgccgccgctgaagtagtgagccgtaatcagcaagagttactgcgccaggtgcaaagcacccgtcaacggctggagatggcgatggattattatctcgccaaccgcacacgtcgctttacgcaaattcatcaccgattacagcaacagcatccgcagctccggctggcacgccagcaaaccatgcttgagcgcctgcaaaagcgaatgagctttgcgctggaaaatcaacttaagcgtaccgggcaacagcagcagcggttaacacagcggctgaatcagcaaaatccacagccgaagattcatcgcgcgcaaacgcgcattcagcaactggaatatcgtttagcagaaaccctgcgcgcacagcttagcgccacgcgtgaacgtttcggtaatgcagtaacgcacctcgaagccgtaagcccactgagtacgctggcgcgtggatacagcgttactactgctactgacggcaatgtactgaaaaaagtgaagcaagttaaagcgggtgaaatgctaaccacacgtctggaagacggctggatagaaagtgaagtaaaaaacatccagccagtaaaaaaaagccgtaaaaaggtgcattaagccagcacgaattcaacgcgttttttgcttatcaagccatgcccgtgctgacagaagtaatctactgcaccacaggcttttaacacctgcaacggttgatggcagtctggacaaagagctttcatttcaataaattccccgcaggatcggcaacgcgcatggccgttatcctgatcaagcacatgctgacattgtggacaatgcagttccatatgaattcctccggtagccattccctctacattcatagagggaatggcagataaaatacttacggataattatttatttttcttgatgtgcttcatcagacgcttacgtttacgcatctgggttggcgtcagggtgttacgcttattcgcatacgggttttccccttctttgaactgaatacgaatcgggcttcccattacgtccaggcttttgcggaagtagttcatcaagtagcgcttgtaggaatcaggcaggtctttcacctgattaccgtgaatcaccacaatcggcgggttataaccaccggcgtgggcatatttcagcttcacacgacgaccgcgtaccagcggcggttggtgatcttcaacagccatcgtcatgatgcgcgtcagcatagaggtccccacacgacgggtggagctgtcatacgcttcacgtacactttcaaacaagttaccaacaccactgccgtgcaaggcagagataaagtgcacacgagcaaaatcgataaagcccagacggaagtccagcgtttctttcacctgctctttcacttcctgactcaggccatcccacttattcaccacaatgacaagactgcgcccactattgagaataaagcccagcaggctgagatcctgatcggaaataccttcgcgcgcatcaatcactaacatcaccacgttggcgtcttcaatggcctgcaacgttttgattacggagaatttctctacagcatcggtgattttgccgcgtttacgtacgccagcggtgtcaatgagcacatactcacgtccatcgcgttccattgggatgtagatgctgtcacgcgtcgtgccaggcatgtcgtaaacaacaacgcgctcttcaccaagaatacggttagtgagtgtagacttacctacgttcggacgacccacaatcgccagtttgatcggcagactttgcgggtcgaagtcgtcttcctcttcttcttcgccgttctcttccgcttcaaattgcgcccagtattcagcgtcttcgtcgacttcctcttgcggtgcgagatcttccatccacggcagcagcacatgctccagcagacttaatacgccacgaccgtgagacgcggcgatcgggtagatttcacctaaaccaaggctgtagaaatcaaccactgcctgatcgggatccagaccgtcagttttgtttgccaccaggaaggtcggtttttcacgggagcgcagatgtttggcaatcgcttcatctgccggcatcaggcccgcgcgcgcatccaccataaacagtacgacgtccgcttcttcaatcgccagcaggctttgttccgccatgcgggtttctacaccgtcttctgtgccatcaatcccgccggtatcaatacagataaactcacggccttcaatttccgcacgaccgtacttacggtcacgagtcagacccgggaaatccgcaaccagcgcatctcgggtgcgagttagacggttaaataacgtggattttcctacgttagggcgcccgacaagcgcgaccacaggtaccatgtttaaagcctcatttttataaatcatcagacaacgcacgctatattcgcgtcgttgttaaaaacaggaaaacggcccctgtccaggagccgttttcaaagtgaacgacagagacgattaacgtgtaatagagtacacggttccgtcttttgcctggatcagcagtttgccgtcagcggcaaccggttcagtctggaaaccggaactatcaactttttgctgggcaacgaaacgaccatcttcgacgttaatccagtgcagataaccttcactgtcaccgaccaccaggttgccattatacagcaccggagaagtcagcaggcgatgcagcagatcgctttgtgtccacagcgtaacgccgccatcaatggtcaacgccatcacccggtcattttgatcgaccagatagatgcgattgccgtcgacgatgaaatcattcacgctacccagttcgcgtttccacataatctgaccactgcgcagatcaagcgccgtcaggttaccattataggccagcgcgaaaacaacgccgttaacaacgacgggagtcgtgtcaacatcgctcagacggtcaatttcggtagaaccggtcgcctgggaaatacgctgctgccaaatcatctggccctgttccatcagcactgcgctgacgcgaccattatcgccccccacgacggccgcaccaaaagccgttgtcggcgcagactcgccacgcaaagagaggctaggcatatcgaggttaactgtccatttgacagcgccgtcagcttcgttcagcgcttgtaactgaccgttactggtgtggattaacaccagaccgtcgctgaccaccgggcggctaagtgcttcacccgcgactttagtttgccatgccacagtaccatcgctggtattcagcgcgtaaacctgcgccttttcgctgccaatgtagacatgcccaccagacacggtcacaccgccagaaagtaatgcaggctctttagagaaccagccatctttctcggccaggctgacagaccagatttctttgccatcatccgcattcagcgcttttactaaaccagcgcggtccgctgcatagacaacgttgtccgccagtgccggatgaagattggaatagaagttgccaatgccgctaccaacggaagtgctccacgccgtggtcggcgtaaactggttttcaacggttggcaatggggacatctttaccacatcttcttcgctgttaaacaggctacagccgcttaaaagggtaacggaaagcagtcctggcagcagtaatttacgcaattgcatcgggtccctctcagatggacaaattattaattttcatctgcatcatttcgctcagtgccggagtaacatcgcttttcacgcctgcttcccatgcactacgcgcaccttgcttatcacctttgctcagcaatgcttcaccacgcaggtcggcaacaatggcagcccacccttcacctttgatggtatcaagggttttcagcgcggcatcagcctgcttgagctgtacctgaacgcgagcaagacgcagatttatcacggctttgagattttcatcgctcgtgtctgccagcccctgttgtaactgggcggcagctttctctagttcatttttgtcaacaaattgctgcgcaagttccaaagaagccagcgcaccataagtatttttattttcagcagcaaatttttccgccgccgggatgctatccggtttgccttcgctcactgcggtaaccgcattttgataggcaagagaagcggagcgtgcagaatcaacctgatggctgttccagtagcgccagccaatcagtgcgccaacgcccaaaatcaccccaacagccagtgctttgccattttcagcaaaaaagcgtttaaccgcttctacctggtcgttttcgttctcgtaaatttccacgctgtccttctccttccttaacccagtaacgtgcgcaaatgcgcggctacgctatcctgcgcaactgccgtttgctcaccagagcgcaaatccttcactactgctgtgccgttagccacttcagactcacccagcaccacagcaacgcgggcaccccatttatcagcacgggcaaactgtttcttaaagttgccgccgccgtggttggtcatcaatttcacgcccggtaattcatcacgcagacgctcagctaatgccatagccgcagattgtgtatcagcaccactagccaccaggtatatatcgacaacaggatcggctttaaattccggattaacggcctgtactaacaatacaagacgttcgaggcccatagcaaaaccgacagccggtgttgcacgaccgcccagttgttccacaagaccgtcataacgaccgcctgcacacacggtgccctgggagccgagactgttagtcacccactcgaaaacggtacggttgtagtaatccagaccacgcaccagacgctggtttacggtgtaagcgatccccgcgctctccagcagtttgcacagaccggcaaaatgctcacgagattcctcgtccagatagtcacctaatgccggagcgtcgttgagaagcgcctgcacttccggatttttactatccagcacgcgcagcgggttagtgtacatgcggcgtttgcagtcttcgtccagcttttctttatgctgctcaaggaatgccaccagcgcatcgcggtaattggcgcgtgcttccaggctaccgatagagttcagctcaagagttacgtgctcggaaatacccagcgcgcgccaccagcgggcagtgagcataatcagttcagcgtcgatatccggaccttgcagaccgaaaacttcgcagcccaactgatggaactgacgataacgccctttctgcggacgctcgtgacggaacatcggcccgatataccacagacgctgttcctgattgtacagaagaccatgctcgatgccggcgcgtacacagcccgccgtcccttcagggcgcagagtcaggctgtcgccattgcgatcctcaaaggtgtacatctctttttcaaccacgtcggtgacttcaccaatcgcacgtttgaatagcggggtctgctctacaatcggcaagcggatttcactgtaaccgtagctgccgagcacgtttttcagtgtgccttcaatgcgctgccagatggccgtttcgccaggcaggtaatcgttcatgccgcgaatggcttgaatgttttttgccacgtttattctctttctgaatataaaaatgaaccctcaacgcttccctcaatgtttcgggagccatgcgggttcaatcatacacgggaagcgaggcgcttcccatcacgttattatttttcaacctgctgaacgtcaattcgacgcgcttcgtccagctgactggctttcgcacgaatgcgtgcttccagctggtcgatcatatcgttgttgtccagacggtctttgcgcacgccatcttcatagaggccgcttttcttgttgccgccggtgacgccgagtgtagaaaccagcgcctcacctgggccattcaccacgcagccgataatgctaacgtccatcggagtgatgatatcttccaggcgttgctccagcgcgttaaccgtaccgataacatcaaattcctgacggctacaggtcgggcaggcgatgaagttgatccctcggctacggatacgcaggcttttcaaaatatcgaaaccgactttgatctcttcgaccggatcggccgccaggcttacgcgcagcgtgtcgccgatgccttcagacagcagcagacctaaaccaatggcggattttactgccccgctgcgcgcaccaccggcttcggtgatccccagatgcaacggctgatcgatctgttttgccagcaaacgataagactcaacagcgaggaagacgtcagacgctttcacgctgactttgaactgatcgaagttcaggcgatcgagatgatcaacatgacgcatggcagattccagcaacgcctgcggcgtcggttcgccatacttttcttgcagatctttttccaggcttccggcgttaacgccaatacggatcggaatgtttttatcgcgcgcacagtcaaccaccatgcgaatacgctcttcattaccgatattgccagggttaatacgcagacaatcgacgccgtattccgctactttcagcgcaatgcgatagtcgaagtggatgtcagccaccagcggcacgttaacctgctgtttgatgagtttgaacgcttctgccgcgtccatcgtcggtacggatacacggacgatatcagcgccaacgcgttccagcgccttgatttgattgaccgttgcttcgacgtctgtcgtacgcgtattggtcatggactgtacggcgatgggagcaccatcgccaatcggcacattcccaacgtaaatacgtgtactttttctacgttgaattggagcctggttatgcatgaaaaatctcccgcgttacccgtctgttactgcgccggactttgttcggcattgagggtcagacgcgcaacctggttagttctgataaaacgactcagatcgacaggtttcccttgatactggatctgtactgcggctggcgcaccaattttcagtttgtacggtgcctggccggttaagttcaaattaccgtctttacgctgcataccgctaaacaattttttaccggtagcatcagtgacctccagccagcaatcggcagtaaagttcatcaccagcgcattcggatcagccaccggcgtggtcacgccagcctgatcggttggcaacggcgcagcaccatctggcgttgttgctgccgttggtgccggggtcgcggcggtatcaacatttgcctggctagggctaacaaccgcattctgttgcggatcaacagctggtgctggcgcagttacggcaggtgtttgcgtgttggttgcggtagtatccacagacgctggcggcgtggacgttgtagccgggtctgtagttgtgctcgtatttaatggaacactctgcccctgctcgctattactgctcagttccgcgctagattgatcggccatagtggtgatctcttcctgctgagctttgcggtcttgccaccaccaggcaccgctcaggccgataaccacaaacaacaccagccaagtgaaggtcatcagccagccgtcgcgttttttgcggcgtttaccgagggaaaaactctgcatcggcgcaacttttgcagcccgaagtggagcctgcttttccagccctggcagcagttcttcttctggaatatgtaccagacgcgcataagagcggatatatccgcgcaggaatgtactagcaagatcggcgggtgccttatcttcttcaatgtcgcgtaccgtggaaaccttcaggcaaagtcgctcggcaacggcctgctgactaagtcctagttgttcgcgagcattacgcaggcgagcgccggtagtaagtgcttcattttggtcgtgcgtggcttcagtattcattcgctgcaggtacgtttaaatgagaattgagatgccggtgaaccatcatgctcacccacaccgcgaaacatccgttaagttaaccgttatcatacagtataagaccgtctgtgtgctcgtgacaaagcccacattcactaaggctaacttactgttgcatcgttacatactgccttaaagtcagcaaaaacgcaccgttaatattgaccagacaattgcaacttaatacttcattcataaaacattacgccacggtacataaagtaaccgtggcgtaatggctatcagaccgctttaatgtcgatggcttcaccctgcatccgtttacgcagggtacgtttcgtacggtcgataacatcgcccgccaactgaccacaggcagcatcgatatcatcaccacgagttttacgcacaatagtggtgaaaccgtagctcatcagcactttactgaaacggtcgatacggctgttgctgctgcgtccatacggcgcacccgggaacgggttccacgggatcaggttgatcttacacggcgtatctttcagcagttccgccagttggtgcgcgtgttcagtgccgtcgttaacgtggtcaagcatcacgtattcaatagtgactcggccctgattggcgttggatttctccagataacggcgcaccgcagcaaggaacgtttcgatattgtactttttgttgatcggcacaatttcgtcacgaatttcgtcgttcggcgcgtgcagggaaattgccagtgcaacgtcgatcatatcgcccagtttatccagcgccggaactacaccggaagtggaaagcgtgacgcgacgtttagacaggccaaaaccgaaatcatcaagcatgatttccatcgccggaacgacgttgttcaggttgagcagcggctcgcccatgcccatcatcactacgttagtgatcggacgctgaccggtgacttttgctgcgccgacgattttcgccgcacgccacacctggccgataatttcgctcacccgcaggttgcggttaaagccctgctgggcggtggaacagaatttacactccagcgcacaccccacctggctagagacgcagagcgtggcacggtcgtcttccgggatatacaccgtttcgacgcgctgatcgccaacggcgatcgcccatttaatggtgccgtcagaactacgctgttcttcaaccacttccggtgcgcggatttccgccacctctttcagtttgccgcgcaacactttgttgatgtcggtcatctcatcaaagttgtcgcagcaatagtgatacatccacttcatcacctgatcggcgcggaagggtttttcacctaaatctttaaaaaactcccgcatctgctgacggttgagatccagcaggttgatttttccatctttcgtggtgacgttttcaggtgtgactaattgttcagacatatgctattccggcctcgttattacacgttatggcccctggagggttgaaaaaagaaacgccccggtgagcggctgctcgtccgggggcgctgcattgtacaaattctggcgcacggatgccacgtttgcacgcggcatttacgaaattattaacgggtgcgcgggcacacttcgccttcgccaaagaaataagcgatttcgcgagcggcagattcgacggaatcagaaccgtgggtaccgttttcggtcaggctgtcagcgtaatcagcgcgcagagtaccagccagtgcgtttgccggattggtcgcgcccagcagatcgcggtgacgctgaacggcgttttcaccttccagcacggaaaccacgatcgggccagaggtcatgaattcaaccagaccatcaaagaacggttttccatcgtgttcagcataaaagccacgtgcctgttcaacggtcaggtgcagcattttggtgccaacaattttgaaccctgcagcttcaaagcgcgcaaagatattaccaatgacgttttttgctaccgcgttcggtttgatgatggaaaaagtacgttcaatagccatttttacctctgtaaattgttctgttgttgtctgtaccagcgtacgagatggcgcggattataatgagcaacagggccgttgactattgatgaaggtaacatttttttaaaataaaatgagttttagcaacaatcagggacaaaacagattattgcatgacaaatttcactgtcgcgatttgccccacgtcatccatcaccagcaattgataatcacctttatccgtcaaatgcagggtcacgttgcgcccgcgttcagttaacggttcgccattcagaaaccaccagcgttcacctgcccctccactactttgcaacggcaaagtcgcttccgctgcgcccggtaaacgtttaataatcgcgccatcgcgaacgcctgtcagctgcagcgggagctgggcatcgtgaccgtatggcgggcaacttgtgctggccggtggtaagcgcacagcgcgacgttcacttgcgggcagccagggttccagcggtagcggccagacatttatcatttcttgtcgcgcttgcgggcaatcagcggcaacacgtttgccattttcatccagccagatggggaaacgaatgccattaatgccttcctgctccggcagtaatagagttggcggctgactcccgtccagcagccaggttgccaggcggcggcgacagttaccgtcaccttccggcaaagactgtccgcccggccagcagataacgccacgagtgacactgttcgggcgcgggtcttccggcagattcgcactgcggctcagtaagatattattgacctgattcaacaatggtacggcactggcaaagccaaactgaccaacaacgggcgtgccgtccggtctgccagtccagatcccaatgacatagcgagcgttaaccccaatcgcccaggcgtcacgatagccatagctggtgcccgttttccatgccagtggggcgacgcgcggcaaggcactatccggcaagggttgcgcttcatcagccataatccggcgaatgatccacgccgccccgctgctcattaaaggccgttcaagcagcggatcgtcaggctgtaagcgcaatttgcctgccttgccgtggcgagcaaacgcggtatacgctgccgccatatcttccagttttgcaccagcgccgccgagaatgagactaagattcggcgcagcaccgttgggcaaatataacggcaatccaacattgcgtaactttgccgcaaaccgtttcggtccataggcttccagcacctgcacagcaggtaagttcaggctgcgcaccagcgcctcgctcatgctgatcgggccatgaaaaccgctatcaaagttacctggtcgataatcaccggtgcgccgggggacgtcttgcagcagacttgccgggtggatcaagccttcatccagcgccagaccataaacaaacggtttgagcacacttcctgggcttcggatgctattgaccatatcaacatgaccaaagcgactatcatcgttgagatcaacgcttcccacccagccgcgaacacgcatatcggtatgatcaaccacgatcatcgccagactgctgcgcggtggcaaccgccctttccagttttgcgccagttcttccagacgtcgttgaagaccggcatccaacgtagtagtgattttgtcgcttttgcttttaccgagcatcatgcggctaaacagcggtgccagttgcggcatttgtcggggggccagccagatgggttcttccctactctcttttacctgctcacgggaccacacaccttgcacggccatccgttcgagcactttattacgcgcggcttcggcacgctccggccaacgatccgggcgaagacggctgggcgcttgcggcaaaaccgccagcattgccgcctcggaatagcttaaattcgcagggctttttccgagataagcccaacttgccgcaccgatcccctgcaacgtaccgccaaacggagcgcggttaagatacaaggtcagaatttcacgcttagacagatgccattccagttgcaacgcgcgccagagctggcgaattttgccgccaaatgttttggggtgaggatcaagcagacgagcaacctgcatagtgagcgtgctgccaccggaaataacccgtccgctagtgagatcttgccatgctgcgcgcgccacgctgaatggattcacccccggatgcttccagaaccagcgatcttcataattgatcagcgcttcaaggtaacgtggagaaacatcttcgattgttaccggataacgccagatgccgtcagcatcggcgaagcgccagagcggcgtaccatcctgcgccacgaccactcgtgcgggattgacttcatgcagcggtagaggccagagtttatctgctccccacgctgcaagaaaaaggagaaagggcgcggctgccaacgttatccagcagccgcgtttggttaacaagcgaggcatttacggtctgacaatcagcagatcttcagccgcgccggtcgcccgccattggggaacatacatactttccaccatcggttgcggtacctgatacgttcccggcgtcaccgcccgcgccagatacaccagcgttaccggttggtattcatcaacggcaaccgccgccacaaagcgatcgtcacggaactcaatgtgcttaatgctcgcctgctgcatctggttcagtaagttctgcacttcgccaccactttgctccaggctggcgctaccgttcgccagattctggttttccagttccagacccgcaggcagcagatccacgactaacgcatccggcacgctgttactggcttttacctgcaaccacaccagcaccagatcgccgctacgtaagctgtccaggcttttgctcttaccatcagtaccaagaatatgacgctcgatttgcagcacattgttcgccggtaaaggtgcggattgcggataaccgctggcatccatacgcaaccataacggctgatcgccactgttgctcacctgcaaggtgacaagttgatcgctattcagattgctgttttgcgctttctcgcctgtcagctgctcagcactgaaagaggtttgcgcctgccatttaccgggtaaatcctgaatcgtacgggcagccaggaacaacgcgttactttcctgcgtgcttagccagcgttcaccaaacgcctgctggctaagtgtgttcagcaaagtgtactgctcatcgggtagcagtttattttcttccagcaaggagagcattaacgcgttgtcgcgcagactactaccgtaatcacccagccatatccgctcatcactattacgcggcgttttcagcgccagcgcaatcgcttcttcaccacgcgtcgcatcacccatggttttcagcgcaacgccaagttgcagcagcggtaaaccagaagcggcatctgcacgatgctcccagatttcacgcagcgcacccagcggagccttttgctgacgggccaacaccagcgcagcgtaagactgtacggcgaatttactggctttgagattatccgcgtacgggatgctcatcatgcccggatcttgtaaatagcgcagcagacgctcattaccccggttaatggcgtctgtcggcacgctgtaaccctgttcgcctgcgcggaccaggaaatccatcacgtaagccgtcagccagtactcttcgtcaccgtttttatcccacagcgcaaagccgccgttatcacgttgcatttgcagcaaacgggaaatgccgatatcgacgcttgcacggcgtttctcatcactgtcgcctttgatgcccaacgcctgcagttgggctgcgttggtataaagactcggaaacaggccgctggcggtttgctcaagacagccgtacggatacgcttttaactctttgatataacgtgcgatgttcagcggtggtttgccgctcaacaacaattgcccttccagcgtaacagggctgaagttttgcaatccatccgccggaatcgcccatgtctcaccaggctgtaacgccgtaccgtaattaaccgtttgtgccgggaacgccggacggacgccgattttccactgcttatgctgatcggcaacggtttcacccggtaacgctaacccgctaatggtggcctgaatttctccatcgccataacccggcaatgctcgcaccgggataaacagcgtagtacgcacacctggcgctaattcaacggctgcgggactatcgctgaccagttcaagcaaaccactggcggtcagggcaacgttcagtttttgcggtttatcggtaagattagtgatatccagcgtcagacggctggtatcgccactcgccataaagcgcggcatgttcagttcagcaatcaccggtgcggcaactatcactttactttcgttgctaccgaagtcatctgccgtccaggcttgcgccatgacgcgcaattcaccgttaaaatcgccaatcggcagtgtaacgctgccttcgccctgttcgttgagcgttaccggcagcgcctgctgcacgacaatattgacgtgattgaccggcggtttaccaccacgtttcagctcatcaccatcgccaccgaaacgcagagctgccagacgcccctgaccttcaataacctgaccgtaaatatcgtaaatgtctgcgccatagcgtttctgaccaaagaacgcctgccacggatctggcgtgacgtagtcagtaatattcagcacaccactatcaacggcagacaccagcacattcacctgtttaggcttctcgccatttttagtgctggctttaattttcacggttaatggttgattgggacgcatttttgctggtgtttccagcgccagatcgaggcgacggttttcatcgccaagcggcagatgcaacacaccaaccgcgcgttttggcgtcgcggagcgagatttatcgccaggacgtaccaccagcgtacttaaatacagatcatgacgattccaggttttatcgaccggaatcgtcagatccagcccttgagcccgaacatcaatctcttgccaccacagcggcccttcactggactcgaccatcgcataacctttacccgccgttggcgcggcgatatgcaacttaatggtgtcgccagggcgataactggctttatccagtttcagcgtgacacggtcgggtcgcactgcgccgctaccgtcgctgttgtcctgccagctatagccagcccagaaacgaacactactgaccgcttcattcggcgctttgacttccagacgataagcgccccactctaccggaaaactgaccttgccggtttcgtccgctttcagatccagagtttgttcattttcgatcagatctttttgatcaaactgactctgccagccttcatcttcactccagttccagtagtaatcgcggcgttcgcgaatcaggcgcacctgcaagccgctcacggcttttttcacgccttgcgcatcgctataaacgatgtcaaaagcggcgttactgccttcatcaacaatgggctgtttcaccgtgctgtcagtacgataatcgtaaacgcttttgctggcgaactgcggacggatccccggcaatgcatcggcaggccagatagcctgctcagcgcggcgcgtcaccgggcgaccgccgctttccagcaaactaccctggaaaataacctgtaatggggaatgcgtttccttccactggctttctgtagaaacttcgccgcgccctttatcatccagcgtcaactgaacttcatccagcgtgcgggaaagattttcggcagctatatcgccgaattcaaaaccaggtaaggcactcacagcttcacgcagtgggcgcaggaaaagttgcccttgcaaagtattaccattagcaggtgcaccatacaggtagtaccccaccacggagaatttcacttcatctttcggcgttagcggggttttctcaccggtcagattcagcgccatgcgctctggcataaaatcttcgacgtggaaatcccacatccgatactgattatcgcccgtgttagcgcgaatatgccacataccggttgccgcattgctatcgagtggccaggtaaagtggtagaggccattctccggctgactaacgacgctcctgagtacctgcccatcgggtttaatcacgtctaacttgatgggttgattgggcaacgctttaccgtctgcatcacgcagcaaaccattgaggattaccgtttcacctgggcgataaagatcgcgtgggccaaacatgaaaaactgtttgctatagcctggcgcgccagcaatgttaaattctgctaagtccagcgccggaagttttaaatcgagtagcgttgtctgaccgtctttacgcgccaacagtaatgccgcgtttttatcattttccagctgcacatgcccctgagcgtcactggttgcctgagtcagagtctgccctttctcatttaataaagagacttcaattccttgctgggccgcgccgttttccagactttgggtaaagatatccagacgattgtgataacggtgagcactaacgccgatatcacttaacgtaaacagcgtcgcgggattactgtaatcgtaacgtccagcctgattcatcacagccagatacacgcccgcctgctgaagcggtttgatatcgcccagcggcagcaataatttttcacgggtgttacgcgcaggattgagatcaaaccgtccggtgtagaccagatccgccatctgcagcagtttgtcactctgccagttcgccaggctattgcggtattcccattggctaatgaatgctggcagagattctggcttaacgcggaagaagttaacatcgacattattaacgttgagcgccattaccggcagcccttcaacgactttgccaggcagcaggctaccacggctggcaaaaccgacgctgggttggatgtcgcgggtagttatagttttttcgtaatctttactgaaggttgcgttgttgagtgctttgacctccttgccaatagtaacgatcaaatcacgtttcggttcgaggtggcgtaaacgtaactctttaagattatcactcagctcccaggcaccatccactttgccgctttttttatcgacgacatgaataacgcgactgaaatcctgatccgggtcgagagggatggagaacgtcagcaccagcgtggctgcaccatcaagttggacttcagagagatccagcaatgtcagcaccttaccggcactctgttgggccagtttttgtctctccggcacggagagttttgcactactcgcgttttcactagaggccgctttagtaacttcagaaggcgcatcttttttcaccgctgttggcgcgttatcgttgttgtcgcaccctgccagcgccagcattagcatgcaggcggctacgcgtaactttttcatttttcatccctgccacaatggcccgttagcaacgtcgaataattattatgcgtgagaatttacgttatgtaattcagtatcacgcccatacaatccgaattttagtgagaattgtggctcagacagccaaatcagcctcttttgcttgtcgcttttcactaaacatccgacaatttagcctaaccccggcaaaaatggagatgcctatgtccacgacatggtttgtaggagccgactggctcgccgaacatattgatgacccggaaattcagattatcgatgcccgcatggcgagccctggacaggaggatcgtaacgttgctcaggagtatctgaatggacatattcccggcgcagtgttttttgatatcgaagcgctttctgatcacacttccccgcttccgcacatgctgccgcgcccggaaacgttcgccgtggcgatgcgtgaattaggcgttaaccaggataagcacctgattgtctatgacgaaggtaatcttttcagtgccccacgagcatggtggatgctgcgcacctttggtgtagagaaagtgagcattctggggggtggacttgcaggctggcagcgcgatgatctgctgttagaagaaggtgcagtagagctgccggaaggagagtttaacgccgcgtttaatcctgaagccgtggtgaaagtaaccgatgtattattggcaagccatgaaaatacggcgcaaattattgatgcccgcccggctgcacgttttaacgcagaagttgatgaacctcgcccaggtttacgtcgcggacatattcccggagcactgaatgttccgtggacggaactggtgcgcgaaggcgaactaaaaacgaccgatgaactggatgcgatattttttggtcgcggcgtcagctacgacaaaccaattatcgtcagctgcggctctggtgtaacggcagccgtggttttgttagcactcgcgacgctggatgtgccaaacgtgaaactgtacgacggcgcatggagtgaatggggcgcgcgggcagatttaccggttgagccagtgaaataagtattttacaggcaataaaaaaccgccgaatttggcggttttttattgctagtctggttcgcggcctttccagcaggttgacttgtgttacatgagcaacgcaggtgcttcacagcaaaacaatactcaccagtaactctctttttgtcaagcaaaagagagtaattattgtttatttagcgtattatcgacaccggccctttccgccgtgttcggtaataaaataacctggcttattagtccgaattcagacaaatataaataaatcctgctcaaaattaaaaattctaaccggtaaaagatattacttaaacatgtaaattcactttcctttaaaaaacaaaaaaccgccaaaatcaggcggttttttgttgctggtccggttcgcggcctttccagcaggttgtattaccgtagtaatgcaagcgcgtctcagcggagacaatactcgccagtaactctctttttgtcaagcaaaagagagttattattgttctgttagtgtattatccactgcggccctttccgccgtctcgcaaacgggcgctggctttaggaaaggatgttccgtggccgtaaatgcaggtgtttcacagcgcttgctatcgcggcaatatcgccagtggtgctgtcgtgatgcggtcttcgcatggaccgcacaatgaagatacggtgcttttgtatcgtacttattgtttctggtgcgctgttaaccgaggtaaataataaccggagtctctccggcgacaatttactggtggttaacaaccttcagagcagcaagtaagcccgaatgccgccctttgggcggcatattttagattatccgattctgtttaaagtcacgcaaaaaaccaccccagcgacgttcatagaatggcgcaatatgttcggtaataaagtggctaattcctttttccccttttttcacctgacaaatatcgattggttcatcgccaggtaatgtatcggtcgctacacttcccgtcgcctgaataatttcttcgatatcaccatcggcttcaatgccaataagtaaattaggctgtgcctcttcgttctctttaatactacaaataaaagcacgcttcaccggcttaatggttttaaataaggtggtgagactatcaatcatttgtgctggcggctctgcgacttcgcttaatatcaggctttcaccgccttccaggatttcctggctgctcagcggatttccctcttcaccaatcaacaaactgatttcacgcggcataaattctttaccggttggcagtttggcattaaggaagagcgtttcgccaagtgtcatctcaaacagcgtgcgaacgggcattacgacaaatgcctgttcgtcttcaaccgcctgttgaagtgcttctaagctggtgaaaaaaggaatgacgctggtgccgtcttctttttcccagtgctgtaaatcaagcgcgctatcttcaaccacagcctcgccctgcgccgccgtaccaggcacccagacggtggattccagtagagtacggaaaaaggccgggcggtgcgccggttcagttgctgctttttccagcaggtcttcaagttcgttttttgtttcggacataagaaccacaattcattcaacgttcggggcgcaaatgcctgatgcgctacgcttatcaggcctacaagggattcgcaatttgttgaatttgcagaatttgtaggccggataaggcgtttacgccgcatccggcatattagtttacgccgttaacagattagctatcgtgcgcacaccaagtcccgtagcgcccgcagaccactgttcaaccggcgctttacggtaagtcgcgctgcagtcgatatgcagccagccttgctgatagttctcaacaaagtggctcaggaagcccgccgccgtgctcgcgcctgccggatacgccgcgcttccggtattgttcagttcggcaaagttagacggcagctggctgcggtggaactccgccagcggcagacgccagaacggttcgttctcctgcgcggcactcgccagcaagcgaccggccagcgcatcgtcaaaactgaacagcgcgtgataatcattacccagcgcagttttcgccgccccggtgagggtcgccgcatcaatgatcatttccggtttctgcgcactggcatcaatcagaccatcggcaagcaccagacgcccttcggcatcagtgttcatcacttcaacttttttaccgttgcgataggtgatgatatcgcccagcttgaacgcattgccgctaatcaggttatccgcacagcagaggaacagcttcacgcgcttgttcagtccgcgcgtaatggcaaatgccagcgccccggtaaccgttgccgcgccgcccatgtcgctcttcatgctgtccataaacgcagtctgtttgatgctgtagccgccggagtcaaaagtgatacctttacctaccaggcacgcgtacactggcgcttctttatcgccagttgggttgtaatccagcgccagcaataccggagaacgttcactaccgcgtccgactgtgtgcagccccatataaccttgctcacgcagatcttcgcctttggtgatccgataagtcacacgatcgcccgcgacgttgctgatcagatcaacagcacgctgtgccagttggcttggtcccaattcttctgccggtgcgttgatggtgtcacgcacccagtcgatgatcatcaggcggttatccagttcctggcgctgggcatcgtccagatccggccacaccactttacgcgtgcctttcggggctttgtaaccttgccagaatgcccagcagcgatccgcatcccagccttcaccgcttaactgaacatgcttgatgcccagaccgtcaatcttgcgcgccgcacgctggatcagccccagatcgtctgccccgttcaaatgcagggtaatgccgtcattattaatgctgtaagttgctttttctccccagcgcgcgtcggcaggttgggtagagagggtaatcttcatcgcttctgtcattttagttatccttctttgtaaaagggccgccagttggcagccccaggatttttccgctaaatgattcgcgttgcaggaaggcggcaagtgagtgaagccccaggagcatagataactatgtgactggggtgaacgagcgcagccaacgcatctgcggcgtgaagcatgacgcggaaattattcggcctcgtccagccagactaacaaaatcgcttcgaggattttctcgttggatgcctgcgggtcgtcgtcgaaatcttccagatcgcaaatccactgatgcatatcggtgaatcgaaccgttttcggatcaagatcgggatacgcatcgtacagtgcttcgccaatttcgcggctatcggtccacttaagtcccatactaacctctgttaatgctcacgcgcatggttgatagtgtaacgcgggatttcgactactaaatcttcgtcggtaacgcgcgcctggcagcttaaacggctttccggctccagtccccaggctttgtccagcatgtcgtcttcctgctcactgctttccggcagactgtcaaaaccttcacgaacgatgcagtggcaggtggtgcaagcacaggatttttcacaggcgtgttcaatctcgataccgttacgcagagctgcgtcgagaatggtttcaccgctattagcttccagaacagcgccatcagggcagagatcctgatgaggcaaaataacaatctttggcatattaaacctcgtccacggaatggcctttcagcgcacgacgaacgctctggtccatgcggcgagcggcgaaatcctgggtttgtttgtctacgtttttaatcgcttgttcgatggcgtcaacatcatcgccctgcgccacttcactcaggtgagcggcagcatcgtcaatgacctgacgttctgcggcgcttaacagcgcggcatcagcagccagcgcgccgtgcagactttccagcacacgcgccgcttctactttttgttctgccagcattcgggcttttacgtcctgctcggcatagctcatactgtctttgatcatgctagcgatttcgctatcggtcagaccgtaagacggtttgacctgaatagacgcctcaacgccggtggatttctccatcgccgtcacgctcaaaagaccgtcggcatcgacctggaacgtcacgcgaatatgcgcaccgccagccggtagcgccggaataccacgcagcgcaaaacgcgccagactgcggcagtcctgcaccagttcgcgctcaccctgcattacatggatagacatcgccgtctgaccatctttaaaggtggtgaaatcctgagcgcgggccaccggaatagtggtattacgcggaatcactttctccaccaggccgcccatcgtttcgaggcccaggctcagtgggatcacatcaagcaacagcatttcgctgtctggcttgttacccaccagaatatccgcctgaatcgccgcgccaatagcgacgactttatccgggtcgatggaagtcagcggtggacgaccgaaaaattcgcctacccgttcacgcaccagcggcacgcgagtagaaccgcccaccatcaccacttccagcacttcatcagcttctacacccgcgtctttcagcgcgcgacgacaagccagtaaggttcgttttaccagtggcgcgatcagttcattgaattgttcacggctgatttcgccctgccagcccgcaacgttaacggtcacggagtccgcatcgctcagcgcgattttggctgcaatggcggcatccagcagttcacgctgaacgcggttatcgctacgatcaggaatgcccgcctgctcgcgaatgtaatccgccagcagatggtcgaaatcatcgccgccgagcgcggaatcaccgccggttgccagcacttcaaacacgccgcgacttaagcgcagaatggaaatatcaaacgtcccgccaccgaggtcataaacggcgatcacgccttcctgaccggaatccagcccgtaggcgatagccgcagcggtcggttcgttaagtaagcgcaggacgtgaaggcccgccagacgcgccgcgtctttggtgccctgacgctgggcatcgtcaaagtacgccggaacggtgataactacaccatccagctcgcctgccagggcttcagttgcccgcgccgccagtgctttgaggatgtccgcagaaacgcgcaccgggttcagcagccccgccgccgtttcaatcatcggcaggccgttttcgctggcctggaattgataaggcagatgcggatagcgttgctggatatcagccaggctgcgtcccatcaggcgtttaacagaactaattgtgttggcggtatcgagcgctgcattagtacgcgcgtcataacccacgctatgcccttgctgttgatagtgaacaacagatggcagcaggtgacggccttcatgatcggctaacgtttcggcctgaccgctgcgcactgtcgccaccaggctgttggttgtgcccaggtcaataccggccgccagacgacgctgatgcggcgcagcactcaaaccaggttcactaatttgtaataaggccatgtttagcttccagaaattaaaaatcgagcagtttttcttcgagttgttcggcactgcttcgcagtttatcgagaaaacgcagcttacgcacggtatccgccgccgcgtcccacgtctcgttgtctaactgttcaaccatcaactgatggcgggtatcaaacatctttttcacacgtttgataaagctttccagccgcgcttcatctttcgcctgttcgatctcgtccagctcttcgcgcagctccaactgttccatcaggaacgcggtgtcgcgcacagtatgctgctcgctggcgagatcaaagccgtgcaaagaaagcaaatattccgcgcgcattaacggatgacgcagcgtttgccaggcctggttaatggttgcagattgctgtacggcggcgagttgttccgcctggcttccgctggcgaatttatcaggatgatactgacgttgtagatcctgaaaacgcaggctcagcgcctgggtatcgagttgatagcgggcaggcaagccaaagagggtgaagtaatccataacattctcagggctgcgatccgccgcgataacggcgaatcaggtaaaacaaaccccacgcgcaggcgaccacggtggggttatcggtatgcgcatcaaacgtggaagctttcgccgcaaccacactcatctttgacgttcgggttggtgaatttaaacccttcgttcaggccttcttttacgaagtccagctgcgtaccgtccagaaattgcaggctcttgccatcgaccacgactttcacgcctttgtcttcaaacacgatgtcttccggcgtcggttcgtcaacaaattccagtacataagccataccactacacccggaggttctcacgcccagacgcaggccaaaccctttaccgcggttagccagaaaggtatttactcgcgctgctgcactgtcgctcagtgtaatgctcataaccaaacctcaactcttattttgcttcacgtttgcttttatagtccgcaatggcggctttgatcgcgtcttctgccagaatagaacagtgaattttcaccggcggcagttcaagttcttcagcaatatcggtgtttttgatcgcctgcgcttcgtcgagagacttccctttcacccattcggtgaccagggagctggaagcgatagcggaaccgcagccgtaagttttaaaacgcgcgtcttcaatgataccttcatcgttgactttaatctgcaacttcatcacgtcgccacaggccggtgcccccaccatgccgctgccgacgttctcgtcgttgttgtcaaaggaacccacgttacgcggattctcgtaatggtcgataactttttcgctgtaagccattataaattctcctgattccgataccgattaatgatgagcccattcgatgctgttcagatccacgccctgcttgtacatttcccacagcggagaaaggtcacgcagacgaccgatggatttacgaactaactcgatggtgtagtcgatctcttcttcagtagtaaaacgacctaaagagaaacggatagagctatgtgccagctcgtcgttcagccccagcgcgcgcagcacgtaggacggttcgaggcttgcactcgtacaggcggaaccactagaaactgcgaggtctttcagcgccataatcaggctctcaccttcaacgtagttgaagctgacgttgagaatgttcggcgcaccgtgttccaggtcaccgttcaggtaaacttcttcgatatctttgatgccgttccacagacggttacgcaggccgcgcagacgttccatctcggtcgccatctcttcttttgcgatgcgataggcctcgcccattccgacgatctggtgaacaggcagagtgccggaacgcataccgcgctcgtgaccgccgccgtgcatttgcgcttcgatgcgtacgcgcggtttacgacgtacatacagcgcaccgatacctttcgggccatagattttgtgaccggagaaagacatcaggtcaactttcaactggctcaggtcgataggcagtttacccacgctctgggttgcatcaacgtgatagataatgccacgagcacggcacatttcgccgatagccgcgatatcctgcaccacgccgatttcgttatttacgtgcatgatggacacgaggatggtgtcgtcacgcatcgctgcttcaagttctttcaggtcgataatgccgttacgctgcggtgccaggtaggtgacttcaaaaccttcgcgctccagctgacggcaggtatccagtaccgctttgtgttcggttttgctggtgatgatgtgcttgccttttttctgataaaagttggctgcacctttgatcgccaggttgtcagattcggttgcaccagaggtaaagacgatttcacgcggatcagcgccgaccagatcggcaatctgattacgggcgatatctaccgcttcttcagcctgccagccgaaacggtgagaacgggaggccgggttaccaaaggttccgtccatcgtcataaactgcatcattttctcggcaacacgcgggtccaccggcgtggttgcggagtagtcgagataaatcggtaatttcattgctctataaactccgtacatcactcaatgcaaggaatcaggctaccggctggatgtacgaccgtgtttacggagtatttagcactccggcctgattctgaattctttttattaagcgcgtaacttaacgtcgatcgcgtcttgtgtgcgggtgcgtggcgcgtcgtgagtatgctgacgaccagacacatccagcacttcctggttattaaccagttcgcctaaagtaatgttgttgagaaaaccggtgagacggtcgctcaaatcacgccacagcgcgtgggtcaggcatttatcgccgccctggcagccgcctttaccctgacaacgggtggcatctacagattcgtcaacggcgctaattacttcgccaacggcgatgctgctggcatctttgcctaacagataaccaccgcctggtccacgtacgctggaaaccagaccatttttacgcagacgggaaaacagttgttccagataagaaagggaaattccctgacgttcggaaatatcagccaacggtaccgggcccgcttcagagttgagcgcaacgtcaagcattgcggtcacggcatagcgccctttagatgtcagtctcatgtcttacttcacctcaaactcgcccctgcccggggttttttattgtaaaagtgggggtattgcatagcagggtcaagtctgacattcccgagtaaattggtcaactatttacttgactgatttagtcgggtatttaaccttcagtgccatttttttatcgtggcgtttgtacctgttgtcggatgcggcgtgaacgccatatccgccctggggttctgtacactgtaggcctgataagacgcattacgcgtcgcatcaggcaacggctgtcggatgcggcgtgaacgccttatccgacctacggttctgttcactgtaggcctgataagacgcattacgcgtcgcatcaggcaacggctgtcggatgcggcgtgaacgccttatccgacctacggttctgttcactgtaggcctgataagacgcattacgcgtcgcatcaggcaacggctgttattcggccttgttacctttattctgctgctcaatagaagccagaatcccgcgcaggatattcaactcctggctttccgggcgcgcacgggtaaacagacggcgcaatttattcatcacctgccccggatggttttcacggataaaaccggttgccagcagcgtttgttccagatgaccataaaaacgctccagatcatcgaccagcggatacggcgtctcttcatgctcgacctgctcgccgttttcctgagttgccagccaggccatgcgcacttcataggcaataacctgaaccgccatcgccaggttcaggctgctgtattccgggttagccgcaatcgcgacatgataatggcatttctgcaactcttcattggtcaagccgacgcgctcgcgaccaaacaccagcgccaccggggtatttgccgcttcagcgacgcttttcaggccgcattcgcgcgggtcgagcatcggccatggcagcgtgcgggaacgtgcgctggtgcccaccaccaggctacaaccggctaacgcttcgtcgagcgtatcgacgatgtgagcattaccaatcacatcgctggcccctgctgccagggcaatcgcctgggagtcgggtttcaccagtggattaaccagccacagattggttaatcccattgttttcatggcacgggcaacagaacccatattgccggtgtgactcgtctccaccagcacaattcgaatattttgcagcattgtctttcttcatctaaagattattcacgcatcttatcataaaacgaagacagatgccgatctcgctgctatactctgcgccgttttcccgttctttaacatccagtgagagagaccgatgcatccgatgctgaacatcgccgtgcgcgcagcgcgcaaggcgggtaatttaattgccaaaaactatgaaaccccggacgctgtagaagcgagccagaaaggcagtaacgatttcgtgaccaacgtagataaagctgccgaagcggtgattatcgacacgattcgtaaatcttacccacagcacaccatcatcaccgaagaaagcggtgaacttgaaggtactgatcaggatgttcaatgggttatcgatccactggatggcactaccaactttatcaaacgtctgccgcacttcgcggtatctatcgctgttcgtatcaaaggccgcaccgaagttgctgtggtatacgatcctatgcgtaacgaactgttcaccgccactcgcggtcagggcgcacagctgaacggctaccgactgcgcggcagcaccgctcgcgatctcgacggtactattctggcgaccggcttcccgttcaaagcaaaacagtacgccactacctacatcaacatcgtcggcaaactgttcaacgaatgtgcagacttccgtcgtaccggttctgcggcgctggatctggcttacgtcgctgcgggtcgtgttgacggtttctttgaaatcggtctgcgcccgtgggacttcgccgcaggcgagctgctggttcgtgaagcgggcggcatcgtcagcgacttcaccggtggtcataactacatgctgaccggtaacatcgttgctggtaacccgcgcgttgttaaagccatgctggcgaacatgcgtgacgagttaagcgacgctctgaagcgttaatgactcaggcgggtgatatcactcacccgccctcgcctttcaggcgctattccgaaatacttcctcactgctttactttctttcgtcactctcccaccatctttccccgattaatggatgataaagaagagccaaggaaaggttatggcactgccagtgaacaaacgcgttcccaaaattctgtttattctctttgttgttgccttctgcgtttatttagtgccgcgcgttgccatcaacttcttctattatcccgacgataaaatttacggtcccgatccctggagcgcggaatccgtcgaatttacggctaaggacggtactcgtctgcaaggctggtttatcccttctagcacgggccctgctgacaacgccatcgcaaccatcattcatgctcacggcaatgccggaaatatgtccgcccactggccgctggtcagttggttacccgagcgtaatttcaacgtttttatgtttgattatcgcgggtttggtaaaagtaaaggcacgccgtcccaggccggattgctggacgatacgcaaagtgccatcaatgtggtgcgccatcgcagtgatgtaaacccacaacgtctggtgctgttcgggcagagtattggcggggcgaatattctggatgttattggtcggggtgatcgtgaaggcatacgtgcggtgatcctcgactccacatttgcctcttatgcaaccatcgccaaccaaatgatccccggcagtggctacttacttgatgagagttacagcggcgaaaattatatcgccagcgtcagcccgatcccgcttttactcattcacggtaaagctgatcacgttatcccatggcagcacagcgaaaagttgtatagcctggcaaaagagccaaaacggttgatcctaatcccggatggcgaacacattgatgctttttccgatcgtcacggcgatgtttatcgcgaacagatggtggactttatccttagcgcgttgaatccgcagaactaacccatgatcgctagcacgataatcattcacaaaaccaccttaagacatgctaatccactggtcagaacagtttaagatgagaaaaattctgtgacgcttgccaacatttctgatgattagcattcccttcgccatttccttgagcaaactttagctattcttatcaattatgcttatgggagatctacagatgatgcctacgcttgctccaccatctgtccttagcgctccccagcgccgctgccagatcttgctgacgctctttcagccggggttgaccgccaccatggcaaccttcagcgagcttaatggtgtggatgatgatattgccagtcttgatatcagcgaaacaggacgggagatcctgcgctatcatcaactcacactgacgactggttatgacggtagctaccgggttgaaggtacagtgcttaaccaacgtttgtgtttatttcactggctacgacgtggtttccgtctgtgtccgagttttattaccagccaattcacccccgccctgaagagtgaactgaagcggcgcggaattgcgcgtaacttttacgacgataccaatctacaagcgttagtgaatctctgctcccgacggctgcaaaaacgctttgaaagccgcgatattcatttcctgtgtctgtatctgcaatattgtttgctgcagcaccacgctggaattacgcctcagtttaatccgctccaacgtcgctgggcggaatcctgccttgaatttcaggtagcgcaggaaattggacgccactggcagcgtcgggcgctccagcctgtaccacctgatgagccactgtttatggcactacttttttccatgttgcgggttcccgatccattgcgggatgcgcatcagcgggacagacaattgcgtcagtctatcaaacgtctggtaaaccattttcgtgagctgggaaatgttcgtttttatgatgaacaggggttatgtgatcagctttatacccacctcgcccaggcgttaaatcgcagtttgtttgccatcggtattgataataccctgccggaagagttcgccagactgtacccacgcctggtgcgcaccacccgcgcggcgctggccggatttgaaagtgaatacggcgtccatctttctgatgaggaaagtggtctggtcgcggtgattttcggtgcctggctaatgcaggaaaacgatctgcatgaaaaacagattattcttcttaccgggaatgatagcgagcgagaagcgcagattgagcagcagttacgcgaactaacgttactgccgctcaacattaagcatatgagcgtaaaggcatttttgcagacaggcgctccgcgtggcgcggcactgattattgcgccttataccatgccattaccgctctttagtccaccgctgatctatacggacctgacgctgacaacacatcaacaggagcagatccgcaaaatgctcgaaagtgcatgatcagcaactgggaacaactttcgggcgcaaaaacattgccggaagcgccaccagcgccattacccagaacacgccgtggcccagatattgatacaggaaaccggcgaaaacggtcatgatagcgatactgccgcccatcgcgacggcagagtaaaccgcctgtaaacggatgacttcgctaccctggcgagcagcaatataacgcatggcggccaggtggcagaccgtgaaggtgccgcaatgcagaatttgcaccactatcaaccacggcaacgccgtagttgctcccataatgccccagcgcactacgccgcaaatcgcgctgatcaacagcatatcgcgtgcactacaacggcggaaaagtttattactcagcgcaaagataatgacttccgccaccacgcccaggctccacaaataccccaccgcgctggcgctgtagccagctgcctgccagtaaatggcgctaaaaccgtaataggccgcatgtgccccctgcaataaacaaacgcaggccagaaagcgccagttctggcgaaccagcgccaaccacgcagaccaaccggtgctctcctgctggcgacttgccccttgtggctgaatcgtcggacggatgagaaagccgagcagcatggatgccacgcccaacgtcaacagcgcgaggatcacccgataatcaaacatagtgaccagtttgcccgtcagcgcgctgccaatgacaaacgccacgctgccccacagtcgcactttgccgtaatcaagcgggaactgcttttgccacgtattcgccagtgcatcggtcaacggtaccagtggactgaaaaagaggttaaagccaatcatcaccagcatcagccacgctacgtgcgcccccgcccagaaggcgacagcaaagagaagtgtcagcagtgccagcacgcgcaaggcggaaatcaggcgggaaggatcgctgacgcggggcgcgatgagcaaactcccgaggaaacgggcaaccagacctgcccccaataacaggccgatggtttctggcgttaaaccaatccctttaagccagacgctccagaaaggtagaaaaatgccgtaactaaaaaagtatgtgaaatagccgagcgccaaccagcgcgtggattgcaaaaccatgagtccctcccgtcaggaggcgttagtctggggttaatcgaatgttggtgcaagttgaaaaataagaatattcgagcctgcttcccgatgtctgtaacgccagttcacaagcactaaaaaactgagatccgcgacgcatgttgcaaaaataatgcgtaattatgccgttacgcttgccaaacgttcctgcacaatggcgatgaaatcgcgtaatgccggcttcatctcccctttcttccacgccatcagtaaagcaatggaaggcacatttccggcaatgggacgaaaaacaacctgtccggtattaaaattattcatataaccgggtatcaaagtgacgcccagccccatgcccaccagattcatggtcaccagaatattcgttgccacctggacgatatttggctggctgttttcttgcgcaaaccacgctttaacgatcggcgcaaggctaccggaatacaccggatcggtactgacgaaattcacgccatccagttgcgcggcggtgatctctttttcatgtgctaaagggtgatcaaccggtaacacaaccactaatggttcgtcaaaaagctccagataatcaatctccgggctataaacaggatggcgcattaagccgacgtcgagttcaccacggcgaattttttcctcctgttgcgtggtgattaaactcaccagctcaatcaaggtgtctggctgtctgagacgaaacatcggtaatacttttggcagtaaattcacttccgcgcttggcacaaagccaatggttaattgtctgtcttcctgaacaattttccgcgcccgtaatttggcattttccgcttgttcgaggattgccagcgcgtcctggagaaaacattctcccgccgccgtcaacgcgactttgcgcttatccctcaccagtaacggaacaccgacacagttttcaagatcgcggatctggctgcttaagctaggctgactggtatgcagtttttccgccgcacgggtaaagttcagtgcctgcgccactgcgacgaaatagcgtaaatgccgtagttccatcaccttccccttgttatcgaaaaaacgtctcagctggtagaaattaactatttcacatattagcaaccaaccagcaacatccttatggcacaaaaatagaaggtcaatacatcttatctttcaggattaaaaaatatgaccacacccagtgatttgaacatttaccaactgattgacacccaaaatggtcgggtcactccgcgtatttataccgacccggatatttaccaactggagcttgagcgtattttcggtcgttgctggctatttctcgcccacgaaagccagatcccaaaacccggtgatttctttaacacctacatgggagaagatgcggttgtcgtagtgcgtcagaaagacggcagcatcaaggcgtttctcaaccaatgccgccaccgggccatgcgtgtgagttatgcagattgcggcaacactcgcgcctttacctgcccgtatcacggctggtcttatggcattaacggcgagttgatcgatgtaccgctggaacctcgcgcctacccacaagggttgtgtaaatcccactggggactaaacgaagttccttgtgtggagagttataaagggctaatttttggcaactgggataccagcgcaccgggcctgcgtgattacctgggtgacattgcctggtatctggatggcatgctggatcgtcgcgaaggcggcaccgaaattgtcggcggcgtacaaaagtgggtgatcaactgtaactggaaattcccggcagagcagttcgccagtgaccagtatcatgctctgttcagccatgcttctgccgttcaggtattaggggcgaaagatgatggcagcgataagcgcctcggtgatggacaaaccgcccgcccggtgtgggaaaccgccaaagatgcgctgcaatttggtcaggacggtcacggtagcggtttcttctttactgaaaaaccggatgctaatgtctgggtcgatggcgcagttagtagctattaccgcgaaacctatgccgaagcagaacaacgtttaggtgaagttcgcgccctgcgcctggcgggtcataacaatattttccccacgcttagttggctaaacggcactgccacactccgcgtctggcatccgcgcggccctgatcaagttgaagtgtgggcgttctgtattactgacaaagccgcctccgatgaagttaaagccgcttttgaaaacagcgccactcgtgcttttggtcctgctggttttctcgagcaggatgacagcgagaactggtgtgaaatccagaaattgcttaaaggccaccgcgcccgcaacagcaaactgtgtctggaaatggggcttggtcaggaaaagcgccgcgacgacggcattcctggcattactaactatatctttagtgaaactgccgctcgtggaatgtaccaacgctgggccgatcttctgagtagcgaaagctggcaggaagtgctcgataaaaccgccgcttaccagcaggaggtgatgaaatgagtgcgcaagttagtctagagttacatcaccgcattagccagtttctctttcacgaagccagcttactggacgactggaaatttcgtgactggctggcgcagctcgacgaagagattcgttacaccatgcgcaccacagttaacgcgcaaacacgcgaccgccgcaaaggcgtccagccaccgacaacctggatttttaatgacaccaaagaccagctggagcggcgaatcgcccgtctggaaacgggcatggcctgggcagaagagccgccgagtcgcacccgtcacttaatcagcaactgccagataagcgaaaccgacatcccaaacgtatttgctgtgcgggtaaattatctgctttatcgggcacaaaaagagcgcgatgaaacattctatgttggaacgcgtttcgacaaagttcgccgtctggaagatgacaactggcgcttgctggaacgggatatcgtcctggatcaagcggtaatcacttcccataacctgagtgtactgttctgatgaatcgaatttatgcgtgtcccgttgcggatgtgccggagggtgaggctctccggatcgataccagccccgtcatcgccctgttcaacgttggcggcgagttttatgccattaacgatcgttgcagccatggtaatgcgagtatgagtgaagggtatctggaagatgacgccacggtggagtgcccgctacacgccgccagtttttgcctgaaaacggggaaagcgttatgcctgcccgccaccgatccgctcaccacttatccagtacacgttgaaggtggtgacattttcatcgacttaccggaggcgcagccatgagcgatctgcataacgagtccatttttattaccggcggcggaagcggattagggctggcgctggtcgagcgatttatcgaagaaggcgcgcaggttgccacgctggaactgagcgcggcaaaagtcgccagtctgcgtcagcgatttggcgaacatattctggcggtggaaggtaacgtgacctgttatgccgattatcaacgcgcggtcgatcagatcctgactcgttccggcaagctggattgttttatcggcaatgcaggcatctgggatcacaatgccagtctggttaatactcccgcagagacgctcgaaaccggcttccacgagctgtttaacgtcaatgttctcggttacctgctgggcgcaaaagcctgcgctccggcgttaatcgccagtgaaggcagcatgattttcacactgagtaatgccgcctggtatcctggcggcggtggcccgctgtacaccgccagtaaacatgccgcaaccggacttattcgccaactggcttatgaactggcaccgaaagtgcgggtgaatggcgtcggcccgtgtggtatggccagcgacctgcgcggcccacaggcgctcgggcaaagtgaaaccagcataatgcagtctctgacgccggagaaaattgccgccattttaccgctgcaatttttcccgcaaccggcggattttacggggccgtatgtgatgttgacaagccggcgcaataatcgcgcattaagcggtgtgatgatcaacgctgatgcgggtttagcgattcgcggcattcgccacgtagcggctgggctggatctttaaggaagcacgatgaaagaaaaaacgatcattattgtcggtggcgggcaagcggcggcaatggctgcggccagcctacgccagcaagggttcaccggtgagctgcatctgttttccgatgagcgacatcttccttatgaacgacctccactcagcaaatccatgttgctggaagattccccgcagttacagcaggtgttacccgctaactggtggcaggaaaacaatgttcatctgcattccggtgtaaccatcaaaacgctgggtcgcgacacacgagagttagtgttaaccaacggcgaaagctggcactgggatcagctttttatagcaaccggcgcggcagctcgaccgctgccgttgcttgatgcactgggagaacgctgctttaccctacgccatgccggtgatgccgccagactgcgagaagttctgcagcccgaacggagtgtcgtgattatcggtgccggaactattggtctggaactggctgccagcgccacgcagcgcagatgtaaggtgacagtgattgaactggcggcaaccgtcatgggccgtaatgcaccaccgcccgtgcaacgctatcttttacagcgccaccagcaggctggtgtgcgcattctgctcaataatgccattgaacatgtggtcgatggtgaaaaagtagaactgacgctgcaaagtggggaaacgcttcaggctgatgtggtgatttacggtattggtatcagcgccaacgagcaactggctcgcgaggccaaccttgatactgccaatggcattgtcattgatgaggcttgccgcacctgcgatcccgcgatctttgccggtggcgatgtggcaatcactcgtcttgataatggtgcactacaccgctgcgaaagctgggaaaacgccaataaccaggcgcaaattgccgctgccgcaatgttagggctaccgctaccgctactgccgccgccgtggttctggagcgatcagtacagtgataacttacagtttattggcgatatgcgtggcgatgactggctttgtcgtggcaacccggaaactcagaaggcgatttggtttaatctgcaaaacggcgtgcttatcggtgcggtcacgctgaatcaggggcgtgagattcgcccaattcgcaaatggatccagagcggcaaaacgtttgatgcgaaactgctgatagatgagaacatcgcgcttaaaagtctgtaaccaggataattagcgaatatctcaatgcctggggcgtggcgaggtgcaagagtgtgtattacgtttaaaagtcattatcttgcaaagggattggttatgaacacactacgttattttgattttggagctgcccgccccgttttgttattaattgcccgtatcgccgtggtcttaattttcattatttttggttttcccaaaatgatgggctttgacggtacggtccaatatatggccagcttgggcgcgccaatgccgatgctggcagcgattattgcggtagttatggaagtgcccgccgcgatattaatcgtgcttggctttttcacccgtccgctggcggtgctgtttattttctacacgctgggtacggcggtgattggtcaccattactgggatatgaccggcgatgcggttgggccaaatatgattaatttctggaagaatgtcagtatcgctggcgcgttcttgctattggcaattaccgggccgggggcaatttctctcgatcggcgttaagaaagatgccggatgcggcgtgaacgccttatccggcatttaataaattacagccactctacccgcaagctcatctcactagttgtactttcccctggtgctagcgcaatgagatcacccccttccgggcgatgatgatcatccggcgcatggctcatcggttccagacagaagaaatcaaacgcatatcctttatcaaacgcagggtcggaaacaaagatgaaataacacggtgcaggtggcgtcgtttccatgatgatggcataaccttcctgcggctgctcgatgcgggcctgaccattccatccggcaaaaccattgttcacccactggcgcggcaacggcgcgggctggttaaaatccagttcctgcggtagctgctcgcaaaactcacccgccagccactgctcccgctccagccagtaaccgctcgcctgtgcctgaatccgcgtttgcgggctcaacggaaaataaggatgccagccggtaccaaatggcagcgtctctgccccttgattggtgacagagagcgtcaccgtcagcgtatccgccgttaaatgaaacgcctgacttacccgatagtgatagacaccgctgcgatgttcatacaccagacacaaactatcatcgctgtggctgacacattgccactcgcccagccagccatcgccgtgtagatagtgcgcatcccactcaacattcggttgcagttgatactcacgcccctgccagacaaaacgattgccgctcacccggtttgcaaatggcaccagcggaaaacaactggcatcggttgccacaccgctttttttaccaggacgtaagagcggcgtcgtatcgcgccagaagccttcgattacgccgccctggtcagaaacgtccagctttaggctcccgtgggataaggtatagatggtcatccgctaactccttaatccgggaagttaatcacaactttcccgcatttgccgctcgccatcagcgcataggcatcacctgcctgttccaggctgaagcgatgggtaatggcgttacgcggccacagcttccagtccgtcagatcatgggcgcatttttccatatggaacagactggtcacccaggagccgataatccgccgttgatggtgcatcagatcggcgctgacctcgaattccacttttccggtttcaccaatgtaaaccacccgtccccagtcagcggtggattgcagtgccagcaagcgacctgcggcattaccggaacaatcgagcgcaacatccgcgccaccgtgggtgagttcggcgataatctgcggcagaccttcggtggttgctaaatagccgtgatccatcacccctaactgttttgccatcgccagacgttccggcagcatatcaacgccgatgatccgttttgcaccgcgacctttcgccagcatcatcgccatcatgccgactggccccagaccgaccaccagcacgttatcactgccggaaacttcgccgcgcaaaattccttcatacgctgtaccaacgccgcaactgataaacgcaccatcttcgtagctcagcgcatccggcaggaggatcagatctttttcttccgccagcaagtattcggcatgaccgccgtcacgctgccagccgtaagccgcttttccttcgccagtacaagaaataggaaaaccgcgacggcagttcgggcaaaaaccacagccagaaatgtgatacaccagcacgcggtcgccctctttaaaatggcggcagccttgccccatcgccacaatctgcccgcacggttcatgaccgttgataaagccctggtataacggtttatcgggtgccgccgctgtggcacggtgttgatgatagatatagtggacatcgcttccgcaaatcccggaggatttcattttgatcagtacctggttaatccccggcgtcggcaccgcaacttcccgcagatcgacggtgctatttcctggtaaataagctgccagcatcgttttcataaatccctcattaacaatacgattaattttcatccctgccgcacccgcgccaggggcgttaaggtttagcgtttcgctttactgcttcgctgggtcagcaagatattcgccagcaccgccaccacgatgatgacgccgcgtaccacctgctggaaaaaggagttaataccgagcagcaccagaccgttaccgattagcgtaatcaccagcacaccaagcaatgtaccgaacagggaaccgcgaccgccggaaagtgccgtaccgccgaccacgaccgcggcgatgacgtcaaactccagaccgtttgcggcacctgcgttaccagaaccgaggcgcgccgccaacaaaatgccggtcaccgccgctaataatccgctaagggtaaagataagaatgcgcacccgacgaacgttgatgccgcacaactgcgccgccgtagcattaccgccaacggcaaaaacgctgcgcccgaaggcggttttgcggctgatgaacacaaacagcgcaaacaacacaatcatgatcagcgcggataccggcacaccgagaaattgtccgcccagccagtccagcacctcgttttcatcaatcggcactggcagtgcgttcgtcataaacagccccattccgcgcagggcgctccacagccccagtgtggcaacgaaacttggtacattaaacacgccgcgcagcaccccggccagcgttcccatcagcgcgcctaacagcaacaccagcaggcacgccaccgccagcggaacttcaaattgcagcaaaaatgccaggcacacgctgacaaaagccaccatcggcccaacgctgacatcaatttcaccggagataataatcagcgtcatcgcccaggcggcaatcccaatggtggcggcatcgcgcagcacgttcatctggttattcaaactgataaagccaggcgcgttcagggagaagaccagataaagaatggcaatcaccaccagcaaaccgatctcattaatatggcgactgacaaattgtttgaggctgacgctcttgccctgcggcaatggtaaactgctagcagacatcttcaggttcctcggtaaaattcatcagtgcacagacagaatggcggacatcagctcatccacattgaccggagcgtgaaactcctggctgaacgtgccgtgctgtaataacaggatgcggtcacacaccagcggcaactcctccacttcactggagataaacaccacgctttttccttcggcagccagctcacggacaatacggtaaatctgctgtttggcttcgatatcgacgccgcgcgttggctcgtcgagcaacaaaatctggctggcagcatagacccaacgaccgatcaccactttttgctgattgccaccagaaagcgtgccgatgggtgtttcgctactggcggccttgaccgtcatccgctgcatcacctcttcggtcaggcggcggatggtggaccattgcagcacaccgttggcgctgattttttgccgattggtcagcactgtattttcgtcaacgcccaaccagggaatgatccccgcttctttgcggttttctggcgtatagccaatgccgcgtttcagcatgtcgccgtaatcggggcgcgtgattttctcgccgttgataacaatttcgccctgttcatactcctccagcccaacaatcgccttcagcaattcactgcgccctgcccccagcagaccagcaatgccgagcacttcgccacgacgtagcgtaaaactgatatcctccagcttgggcttatggcgtaacgcacggacttccagcacggcctgatccacaatttcctgaggggctaccggcgcaatatcaacgtgatcgcgcccgagcatcaggctcacaatatgatgcgtggaggtgttttcgagcatcacatcgcccgccacctgaccatcgcgcataacggtggcacaggaggcaatgcggcgaatttcttccatccggtggctgacataaatcaccgccacgcccagtgcgctcatctttttcaccgcgctgatcaccagttcaacttccgcactcgcaaggctactggtaggttcatcaagaatgaccacgcgcggctcgcccttcatcacccgcgcaatttccaccagctgcttttgcgccgggcttagcgtactaacaagttgttcaggactaacgtcaacgcccagcgcctgtaagcaacgttgggcatcctgcgccatttgcaggtaatcaatcatgccgttgcggcggggccactgaccgaggcagaggttttccgccactgtcagcccttccaccagacttaactcctgataaaccgcgcgcacccccagttcagcggcacggcgagtcagcgtagcttcgtcaccttccagtcgcgtctcgccaatccagatatcaccgctatccgggcgttcgctgccggtaagcattcgaatgagagtgcttttgcccgcgccgtttttacctaacagcgcacgaacttcgcctttattgagcgtgaagttaacgttatccagcgcaacgacgccgggataacgcttatttcctgccaccacttttgctaccgggactgcctctgttgccgtgaacatagggacctctgcgaatcagcgattagggcagaccatcaacgtgcgttgccagccactgtttaccgtcttccgttttggtatagagatcgataggcacctgaatcactttttcaccgtcggcttgtttattgataaccttcaatgtttgcgcgaaaacagcattgcccattttcttaccggaaatatccactaccgctttcagcacctgattgttttccagctcctgagcaatttcggttgtcatatcgctaccgaaaacagcaatttttccggcctgattttgattacgtaccgcttttaccgcgccgagtgtcgcaccgccgctttcccccataatggcgttgagatccggcgtggagataattagtttttcaccaacggaaatcgctttatctaaaacagtcccttcctgattagcgacaatttgcgcgccgggaacgcgggattttaaaacttcttcaaatcctttacgtcgctgcacacaaacttcaaaggcttcgcaattgatgacggcaattttcggctggtcaattttattggcaataaaataatcagcggcagcgttacccagttttttaccaaattccagcggatcgccgaccagatacgcgctgacatatttatcgacccccttttgattaatacaggtgttgtagcaaatcaccggaatgcccgcttcactggcgcgacgaacggtacggctactgccattttcagacactgcgcttaaaataatggcatcgacattacgcgccacgagggtatcaacaaaggtactttctttgctaatatcaccctgggcgttagtttctattaactgaacttgtacactggaatcttttgccgcatcctgaacgccctgacgcactccagcgtagtatccctgagtatcaaggtatattgcgccaatggtcatttctttttccgcagccctggcaaatagtgcgctacctaatagcgtagccattaataatagattacgggttgttctcatttttgtaggcatagagcctcctgtagggtttttattaacaacggcttattctaattattttgtgatgagcggcagcgcgtgccgctcaaatattacagttaatagggtttagtgaacgcggttaaaaataaaaggcatcacggtggtgaataatgccgctttcggccaagccggattaatcgccgtcaattcagcgcgagcagactcatattgcgcaacctccccgagtcccgcggacgccagcatcgccaccatcaggcatttttctttatgctgctgttgtaaatcgccatacaggctcaacaagtcaggttggctgacggcaaagaaatccgcttcgatactggttttcgccatctcttgcgcccactgtttcatttcactaaacagttgctgtgcggtttgttgttcgcccagcagtcgcagcgccatcccttgccagaagagataatcaaccggctgatcgttgtaataactgtgaatgttaatagtgcgatcgccggtcgccgccagacgtaaacaacgcgtcgcttcagtttcatcgccctgcgcgttggcgcatatcgcctgccagaaccagatgtcgttatcagtttgccccggtaaacggccttcgcttaaattctccggataatgcagcgcggcatgaagcagttcgcaggcctgctgcggctgtctggcatcaagatgctgccaggcgcgtaataactggttgaggataaactgactggtgaccttcccttccccgccttcccacgggtggaatttgcgcgtggcgagaatgtccgccgctttgtctgcctgacccgtgagatgccacaaattgagcagttctgcggtcatgtcgtcgcgtttcagcgcaatttccagattattttccagacgcgccagtcgtttctccggtgtggctccacttaacttatccagcaaatcccgttcgaaaagcagacgtgcatcctgcggcgcaagctgataagcattatcaagataacgcgcggccagctcataatcgtgttgcttattccacgcatggatcgctaacccgcgccagccgtcggcaaactccgggctcatctctacgcaacgttgccaaaaggcaatggctttgttgtagctacgtttgttgtagtagaagcaagctagtaaatggcgagcaaaccagcactcttcaatactctccagcgccgccacttcttccagcgtattcgggaaacggacaaactgcgggaagacatcaatggcttttgcgaccagttcgccacgttcggctttcggcagcaagctggcttgcaggtaaagcggcagcgtgcgctggcagtccagtgcgttcagcatctctgccgccagggtgggcattccccagttaatcagttgcccggcggtcatcagggcgttaacgtcgcgtccctgacacagaccgcgccactgcgcgagagcactttcgctacgaccatcgaaccagttcagccaccacagagtggcgttcagcggataatcgcgcagcagtttctcgcgctgcacacgcgcgttgtcctgacgaccacttaacaccagcagcagattatgcaggcaaagcacttcctgattggttgggcaggcgcgaagactttgttggcaaaaatccagaccagcgtcgaagttaccattacgcgccgccagtcgtgccaggccataatagccaccggctttgctgttgccgctccagaccgcacgccagaaatcctcttcggcttgttgatattgtccctgacgttcgtaagcactggcgcgaatcaaactcgcctgtccgcactgcggatttttgttcagcgcatgtgcgcgtttcagagcctgagtggcatacgccaccgcttgcgggaaatctgcgcggttatattccagcatcgccagcgccaggttacagcgataatccagcgggtccagcgccacgccgcgcaggtagtaatcgaacggactacggctggcgtgatgatattgctccagatgctgaccgataaaccaggcttcatctgtactggtaatgtcttgtgctgccagtggcgctttggcgacgtccggtaacggcaacgcttgcggctgatgttcctgataactcagtacaatattgccgtcggcatcggagagctcaatggtcagcctttcaggattgataccgtgcaacacgccctggatggcggtcgcaggcatcagtgccacggcatcatcaagtaacgcgttgcatttaccgatttcgcggatcgccaggcggtatccgttcaacggagagatggcatacagcccccactcaatcccccgcttactacgctggagttttatcaccgcatcgcgggaggcattttgcaccatgcccaaagaatgataaggcaggaaatactgctcaaaacgcttctcttcgtaagcatcaagccaggtaaaatcgggctggttatcggcaaaaataccggtcatcagttcgatatacgggccgttattgtcggtcagactcttatcccacgcctggccaaattcactgtgtccccaactccactgttttttacctggcgcaatatggtggttggcaacgtgcagcaaaccgccatcttcatcgtgacaccacgcgccgacaaaatcgtactggcttttttcggccatataactggttggaacaggcacatttttatagcgagaaatgtccactccagcggagtagtccactttgtagtaagtgccggtagcgatggggaaagcggagacggcccgtttgccgtgatcaaacaccgccgttacatccggcgggaagacgctctgatgcccttccccccctttcactgccgggttggcccaccacaagaaatgacgcggcgtggcgttcccgttatagacgcggctggcgatttccagcgccgcccggtcagggcgcagggtgaaacctgtcatcacctgtaaaccatgcatcggctccgtttcgcctacccacaccgtctgtgcaccgtcttcatgggcttcgagggtgaaatcaacgggcataaaggtggtcgggcgatgatgttgcggccagttaaactcaatcccaccggaaatccacggccccagcagccccaccagcgcaggtttaatgacttcattgtgataaacaaaatcgcgctgtttcactttatcccacgcgcgatgcacccgaccgcccagttccggcaggatcatcactttgatgtagtcgttttccagccacaccgcctgccaggatttcagggttttctgctcgctcagcgtatcggtcacgccgtagggataaaccgcgccggagcttccctgataaacgcgattttccaggaacatgggatgtatatcctgcggcccggtttcataggtcgggatctcaacgcgctcttgccacacttttactggagtcatggtgccctcaatattaacaagacatactgaattaaaagatttgtggcagtgtattgaacaatctggcaatgttttcgcggaataatcacgcaattaactaaacaaggtttagtgaagatgagagcctgcattaataatcaacagattcgccaccataacaaatgcgtgattctggaactgctgtaccggcaaaagcgcgccaataaaagtacgctggcccggctggcgcaaattagcattccggcagtcagtaatattttgcaggaactggaaagcgaaaaacgggtggtgaatattgacgatgaaagccagacgcgcgggcatagtagcggtacatggctgattgcgccggaaggtgactggacgctgtgcctgaacgtgacgcccaccagtattgagtgtcaggttgctaatgcttgtttaagtccgaaaggtgaatttgagtatttacagattgatgcaccgacgccgcaggcgctgctgtccgaaatcgaaaaatgctggcatcgccaccgtaaattgtggccggaccataccatcaacctggcgttggcaatccacggtcaggttgatcctgtgaccggcgtgagccaaaccatgccgcaagcgccgtggacaacgccggtggaggtgaaatatctgctggaagagaagctcggcattcgggtgatggtcgataatgactgcgtgatgctggcgctggcggagaaatggcaaaataatagccaggaacgggatttctgcgtgatcaacgttgattacggcattggcagcagcttcgtgattaacgagcaaatttatcgcggcagtttgtatggtagcggacagattggtcacaccatcgttaatccggatggcgtcgtctgcgactgtggacgttatggctgcctggaaactgtcgccagcttaagcgcattaaaaaaacaggcgcgggtatggctaaaaagtcaaccggttagtactcaacttgatcctgaaaaactgactacagcgcagttaatcgctgcctggcaaagtggagaaccgtggatcaccagctgggttgatcgctctgccaatgccattggtttgagtctgtataacttcctcaacatcctcaatattaatcagatttggttgtacggtcgcagttgtgcctttggtgagaactggcttaatactattattcgccagacaggatttaacccgttcgaccgcgacgaaggaccgagcgtgaaagcgacgcaaattggctttgggcaattaagccgcgcacaacaggtgctgggaattggctatttgtatgttgaggcgcagttacgacagatttgatggcgcgataacgtagaaaggcttcccgaaggaagccttgatgatcataaacgaaaaattgcctgatgcgctacgcttatcaggcctacacggagattgcaatatattgaatttgcaaagttttgtaggccggataaggcgttcacgccgcatccggcatgaacaacgagcacattgacagcaaatcaccgtttcgcttatgcgtaaaccgggtaacgtgcgcagatgtcgagaactttacctttgatgcgctcgataacggcttcatcattgatgctgtccagcacgtcacacatccagccagccagttctttcgcttcggcttctttaaagccgcgacgggtaatcgccggagtacctacacgaataccggaggtcacaaacgggctcttcggatcgttcggtacgctgtttttgttgacggtgatgttagcacggcccagagcggcgtctgcttctttaccggtcaggtttttatcaaccagatcaaccaggaacaggtggttatcagtgccgccggaaaccactttgtagccgcgctcgaggaacacttctaccatcgctttagcgtttttagcgacctgctgctggtaagttttgaactcaggctccatcgcttctttcagagcaaccgctttaccggcgattacgtgcatcaacggaccgccctgaccaccagggaaaacggcagagttcagttttttgtacagctcttcgctaccacctttcgccaggatcaggccgccgcgcggacccgccagggttttgtgagtggtggtagtaacaacgtgagcatgaggaaccgggttcgggtagacgccagcagcaaccaggcccgcaacgtgcgccatatcaacgaacaggtaagcaccgatgctgtcagcgatttcacgcattttcgcccagtccaccacgccggaatatgcagagaaaccaccgataatcattttcggcttgtgttctttggcttgtttttccagatcggcgtagtcgatatgaccggtagcatcgataccgtaaggaacgatgttgtacagtttaccggagaagttaaccggagaaccgtgagtcaggtgaccgccatgcgccaggttcatacccagaacggtatcacctggttccagcagcgcggtgtagaccgcaaagttagcctgggagccggagtgcggctggacgttagcgtagtcagcgccgaacagttctttcgcacgatcgatcgccagttgttcaacgatatcaacatactcgcaaccgccgtagtagcgtttgcccggataaccttcagcatatttgttggtcagctgagaaccctgcgcctgcattacgcgcgggctggtgtagttttcggaggcgatcagttcgatgtgctcttcctgacgtactttttcctgctccatagcctgccacagttcggcatcataatcggcaatgttcatttcacgctttaacatccgcatctcctgactcagctaacaataaaatttttggcctttataggcggtcctgttggacaacggcgaacagtataaccgaatcattgtgcgataacaggtcttgacaaaggaatttacgcaaacgattaccttcaggctacgcaaggctttggagaataaagagcttgcaaccggaaacggatttcttttcaggtttgtgatgcaaatttttcacttcatcacattctttctgaaaaacaccaaagaaccatttacattgcagggctattttttataagatgcatttgagatacatcaattaagatgcaaaaaaaggaagaccatatgcttgacgctcaaaccatcgctacagtaaaagccaccatccctttactggtggaaacggggccaaagttaaccgcccatttctacgaccgtatgtttactcataacccagaactcaaagaaatttttaacatgagtaaccagcgtaatggcgatcaacgtgaagccctgtttaacgctattgccgcctacgccagtaatattgaaaacctgcctgcgctgctgccagcggtagaaaaaatcgcgcagaagcacaccagcttccagatcaaaccggaacagtacaacatcgtcggtgaacacctgttggcaacgctggacgaaatgttcagcccggggcaggaagtgctggacgcgtggggtaaagcctatggtgtactggctaatgtatttatcaatcgcgaggcggaaatctataacgaaaacgccagcaaagccggtggttgggaaggtactcgcgatttccgcattgtggctaaaacaccgcgcagcgcgcttatcaccagcttcgaactggagccggtcgacggtggcgcagtggcagaataccgtccggggcaatatctcggcgtctggctgaagccggaaggtttcccacatcaggaaattcgtcagtactctttgactcgcaaaccggatggcaaaggctatcgtattgcggtgaaacgcgaagagggtgggcaggtatccaactggttgcacaatcacgccaatgttggcgatgtcgtgaaactggtcgctccggcaggtgatttctttatggctgtcgcagatgacacaccagtgacgttaatctctgccggtgttggtcaaacgccaatgctggcaatgctcgacacgctggcaaaagcaggccacacagcacaagtgaactggttccatgcggcagaaaatggcgatgttcacgcctttgccgatgaagttaaggaactggggcagagtctgccgcgctttaccgcgcacacctggtatcgtcagccgagcgaagccgatcgcgctaaaggtcagtttgatagcgaaggtctgatggatttgagcaaactggaaggtgcgttcagcgatccgacaatgcagttctatctctgcggcccggttggcttcatgcagtttaccgcgaaacagttagtggatctgggcgtgaagcaggaaaacattcattacgaatgctttggcccgcataaggtgctgtaatttgatgttgccggatggaaacatccggcaacccttgacgcggtttaaattgccgcgtcgtcctcttcaccggtacggatgcgaatgacccgtgccacgtcaaagacgaagattttaccgtcaccgattttgccggtttgcgccgtgcgaataatggtatcgacacaggtatcgacaatgtcgtccggtacgacaatctcaattttcactttcggcagaaaatccaccatatactccgcgccgcggtacagctcggtatggcctttctggcgaccaaagcctttcacttcggtcaccgtcatgccggtaataccgacttcggccagtgcttcgcggacatcgtccagcttgaagggttttataatcgcatcaatctttttcatgctattccttgaaaaggtcgcctgtcttttgatctgctaaacgtaacacataacgccaattcattccttgaaatcgtttgcatccagctcgtgtcgggaaagcagtttataaaattctgtccggttgcgccccgccattctcgccgcgtgggtgacgttgcctttggtgatttgcagcagcttacgcaaatagttgagttcaaactgattacgtgcctcaacaaaggttggcagcgccgtattttcaccctccagcgcctgctccaccagcgcatcactaatcaccggagaactggtcagcgccacgcactgttcaatcacgttgaccaactggcgcacattacccggccagctcgcggtcatcaggcgtttcatcgcatcggtagagaacgcgcggacaaacggtttatgtcgctctgccgcctggcgcaacaggtgatttgccagtagcggaatgtcttctgtgcgctccgccagtgccggaattttcaggctgacaacgttgaggcggtaatagagatcttcgcggaattccccgcgcgccatcgcttttggcagatcacggtgagtggcagaaataatccgcacattgatatcaatatcgcggttactgcccagcgggcgcactttacgctcctgcaacacgcgcagcagtttgacctgtaacggcgcaggcatatcgccaatttcatcgagaaatagcgttccgccttccgccgcctggaataaaccttcgcgattgctgacagcgccagtaaacgcgccacgcgcatgaccaaacagctcgctctccagcaattgctcgggcaatgcgccacagttaatagcaataaatggtttgctgttgcgcgggctggcgttgtggatagcctgggcgaaaatctctttcccggtgccgctctgaccgttaatcaaaacgctgacgtcactttgcgccaccagccgcgcctgttccagcaaacgcagcatcagcgggctgcgggtgacaattgcctcgcgccagcgttcatcggtggctggcgcggattgctccagcgcatcgtcaattgcctgatatagcgcgtctttgtcgacaggcttggtgaggaaactaaaaacgccctgctgtgttgcagcaacggcatcgggaatagaaccatgcgcggtaagaataattaccggcattcccggctgcactttctggatttcagcaaacagctgcataccgtccatttcatccatccgcaggtcgctgatgactaaatctactttttcgcgattcagtacccgtaatccttcagcgccactttccgccgtgaccacactgtagccttcgctggtcaggcgcaggccaagcagtttcagcaatcccggatcgtcatcgaccaataataaatgcgcaggtttatggctcatcaggagtgacctcatgggtggatggcgcgggcttttcactctcgtgcggcgtatccgggctgaaatttccagccggtttgcgggtgctgagctggcgttcaatatcggtcaggttttccagcttgcgggtggtgagttccagttgctgctgtagaacgtgatgttgctggcgcaatgtatccagctcgctgtcgctggactgctggagtttactgtaacgttggcgctcttccgccagttgcagttgcagcgcctgaccatcgcgccagagttgatacagtgggcgaacctgtgccgggatctcggtacttaacgcttcaatacgcgcgaccagctggcggcgctcatacggcgtaattttggcgtcggcgagcaaaatcccttgtttaaaggtattttgccagctgccgtcgtcatattggcgagcttgctgacggctctgcgcaggcattaaacgatcagcacaatccatcgcccgcagccagtaaagcggattggtttcggtacttttaccttgcagcgcccagatgtcgctacattcagtagaaagatagtcagccagttgataaaccggaattttttcttctgctggcgtatcaatggctggcttattgtgattctgcacgcaacccagcaatgccagacatggcagccctgccagccacagccgtcggggcaataatcgttgaaaaatgtgtcgcatattcaccagacttaaagcctatcccagtgggcgtaattgttgcagacagtctggacatggacagcgcggagaaaccggagcgtacatatcgtacgtgaagatttcgagcactgcccggggccgaactgacaaataaaatagcctgataggataggctgttagcattatttcgtgtttttgctgctcggtaattcaatgcggaaacaaacgtcttgcccgctctcgtcgaccagatacagttccccttgcatacggcgaatacaatccctggcaatgcttaatcccagaccgctgcccttcaccgccccttttcgctggtggcttccctgaaaaaagggttcgaagatcatggcgcgttcctcttgcggaatgggcgtgcctgtattgatgacatcaatataaacccgcgcaccatgtaaactgctgcgaaggcaaatgttaccggattcagccccgtagtgcaccgcattggagtaaagattatccagtacgctcatcagcagcattggctccgccaggcaagctgttgctttgagatcgacgtcggtatgcatcattttagcccgtgcgggcaggctatgagcagaaaccactgtctccaccagcggtgctaactcaacattctccagttccaccgcactgtccgcctgtttacggttgtaatcaagcagttgttcgatcagtttttgcaaattgcggctgctgctatcaagaatgctcaccacctctttttgctctggcgtaagcggcccgacaacctggtcagccagtaattcagtgccctcgcgcatactcgccagtggcgtttttaattcatgagataaatgtcttaaaaattgatggcgttgggattccagccaactcaggcgctcacttaaccaaagaatacgttgcccaacgctgcgtaactcgctcggtccactgaagctgacgctattgcccagagaacgcccttcccccagacggttgatcatgcgctcgatatttttcaccggcccgataatcatccgcgtgaaaagcagtaccattaccagactcaccagaaatagcaccaggctttgccaaccaaaatattgcccacgttcggcgatttcacgctgaagctgctgcccacgagagaacaccactgtgcgcgtggcctgtaccatttcggtattggcactggcaaaggcttcaagacgtgcggcggcggcagcatcgggaccgctgttgttacactgaagttgagccagattgtgcaaatcctgacgtaatgcctggtagagtttatcgtccggcagcacgcctgcgtgggcatcgagcatttcgctgtaacgcttgcgctggctttgataaaccttcgccagggttgggtcgtccagcacgcaatactgacggtaactacgctccatctccagcgccgcgttggtcatcgcttcactgcgccgggcatcaataagcgtagtgcggttaaccagcgccgcctgatcgctaagcgcattcaggctttgccaggcttgccatgccagcaccaacaggggcagcagaatcagcaaaaatgccagcattaccagttgtcgtaaactgcggggaaaaacgggccagcgtttcaaggtgttactctcgtcagacgcgaatagcctgatgctaaccgaggggaagttcagatacaacaaagccgggaattacccggctttgttatggaataaggcggtgcctaactcgacgtttcgcccgatggttgatatagctacgctgatatcagaagttggacggcaggcaccttgttgtgcgtcattcgtattttatgtagcacgtcccgaaggggctgacataagtcggtgaatgagccactggttactattatgcagtaactgtgccaataaagaaaatagtttggtaacgtactgattatacgttgctttgaggggtttatgtctcctccgctgtttgaatgtaaatcagccactgtgtcgctaaaaagagacaacttaagataaacttattagataatattaaaatcaatgagttaagtgtcgccagaaagcgacacggcaaaccacccattgtcgtgatttacagacacaaaaaagctcccggagttgggagcttatgatagtggttggtgcttaatgccgcatccgggctgcaaaaccaatgggctgacgacttaccccaactgcttacgcgcattgcggaaaatgcgcatccatgggccatcctcgccccagttttccggatgccaggagttgctgacagtacggaaaacacgttccgggtgcggcatcataatggtgactcgaccactttcagtcgtgactgccgtaataccgttcggactaccgttcgggttagccgggtaggtttcagtgactttgccgaagttatcgacatagcgcagtgccaccagccctttgctttccagtgccgccagatgcgccgcatcacgcacttccacgcgcccttcaccatgagagacagcaatcggcatttggctgcccaccatcccctgcaacagcagagacgggctttgggttacttcaaccaggctgaaacgcgcttcaaagcgatcggaggtattgcgcacaaaacgtggccacaactcactacctgggatcagttcacgcagattagacatcatctggcaaccgttacatacccccagcgccagcgtttgcggacggtggaagaaggttgcaaactcatcgcgtacacggtcattgaacaggatactcttcgcccaaccttcaccggcacccagcacatcaccgtaggagaaaccaccgcacgcgaccagggcgtggaaatcttccaggcccgtgcgtccggtcagcaggtcactcatatgcacgtcgatagcatcaaagcctgcacggtggaaagctgccgccatttcaacatggctgttcacgccctgctcacgcagtacggcaactttcggacgtgcgccagtggcaatatacggtgctgccacatcttcgttgatatcgaagctcagttttacattcaggcccggatcggcgtcgttagatttcgcctgatgctcctgatcggcacactccgggttgtcacgcaggcgctgcatctgccaggtagtttctgcccaccagacacgcaacgtggtgcggctttcgctgaatacagtctgcccgttggcggtaatcacaaaacggtcaccggaaaccgcctgccctacataatggacacaatcagcaagcccatgctgtgccagtacggactcgaccgcttcacggtcagcggcacgaacctgaatcaccgcacccagttcttcgttaaacaacgccgccaggcgatcgtcacccagagtggcgatatccgcgtcaatgccacaatgaccagcaaaggccatttccgccagcgttaccagcaggccgccatcagagcggtcgtgatacgccagcagcttacgctgtgcaaccagcgcctgaatcgcgtcatagaagcctttcagttgcgcgacatcgcgtacatctgccggtttgtcgccaagctgacgataaacctgcgccagcgccgttgcgcccagcgcgttattgcctttgcccaaatcaatcagcagcagtgcgttatcttcggtagaaagctgcggcgtgatggtgtgacgtacatcttccacgcgggcaaatgcagaaatcaccaggctcagcgggctcgtcatttcgcgctcttcgttaccttcctgccagcgggttttcatgctcatggagtctttacccaccgggatcgtcaggcccagcgccggacaaagctcttcgcccacggctttaacggcttcatacaggcccgcatcttcaccagggtggcctgccgccgccatccagttggcggaaagtttgatgcgtttgatatcgccaatttgtgttgcggcgatgttggttaacgcttcaccgaccgccagacgggcagaggcggcgaaatccagcagcgcaaccggcgcacgctcgccaatcgccatcgcttcaccgtagtagctgtcgaggctggcggtagtgaccgcgcagttagcgaccggcacctgccacggccccaccatctgatcgcgcgctaccatgccggttacgctgcggtcgccaatggtcaccaggaaggttttttccgccacagtcggcagatgcagcacacgtttcaccgcgtctgcaatggtgatcccttcacgggccagcgcgtcgcctttcgctttcagcgtttgtacatcgcgggtcatcttcggcgttttaccaagcaggacgtccagcggcagatcgatcggctgattatcaaaatgacgatcgtgcagagaaagatgcagttcttcggtcgcttcaccaatcaccgcgtagggtgcgcgctcacgcttacacagttcgtcaaacagcggtaattgatcggcagcaaccgccagcacgtagcgttcctgggattcgttacaccagatttccagcgggctcatgcccggttcgtcgcttagaatctcgcgcagttcaaatttaccgccgcgcccgccgtcgctcaccagttccggcatggcgttagaaagaccgccagcgccaacgtcgtggataaacaggattgggttggcatcaccaagctgccagcaacggtcgatcacttcctggcagcgacgctccatctccgggttgtcgcgctgtacggaagcaaagtcgaggtcggcatcagactgaccagacgccatagaagacgctgcaccaccgccaagaccgatgttcattgccgggccgccgagaacgaccagcttcgcaccgacgttgatctcgcctttttgtacgtgatcggcgcgaatgttgccgatcccgcccgccagcatgatcggtttgtgataaccgcgcagctcttcgccgttgtggctgttcactttttcttcataagtacggaagtagccgttcagtgccggacgaccaaattcgttgttaaacgccgcgccgcccagcgggccttcggtcatgatgtccagcgcggtgacaatgcgctcaggcttaccgaaatcttcttcccacggctgttcgaagccaggaattcgcaggttggaaacggagaaaccaaccagacccgctttcggctttgcgccgcgcccggtggcaccttcatcgcggatttcaccgccggaaccggtcgccgcgcccggccacggagaaatcgccgtcgggtggttgtgagtttcgactttcatcagaatatgcgccggttcctgatggaaatcgtagcggcccgtttcgtggtcagcaaagtagcggcccacttcagaaccttccattacggcggcgttatctttataagcagagagaacgtgatctggcgtggtttcgaaagtatttttgatcatcttgaacaggcttttcggctgctgttcaccatcgataacccagtcggcgttaaaaattttgtggcggcagtgctcggagttcgcctgggcaaacatatacagttcgatgtcgttcgggttacgaccaagctttgtgaaagcatcctgcagatagtcaatttcatcttccgccagagccaagccaagacgcaggttagcgtcgatcagcgcctgacggccctgccccagcaaatcaacgctggtaaccggagtcggttgatggtgggcaaacaactgctctgcatcatctaaagcaaaaaagaccgtttccatcatgcggtcgtgcagttcagcggtaacctgctgccattgttcattggtcagcgtaccggcttctatatagtaagcaacgccgcgctcaaggcggtttacctgttgtagcccgcagttatgggcaatatcggtcgctttgctagaccagggagagatggtgccaggacgcggggtcaccagcaggagtttgccttgcggggcgtggctggcgagtgccgggccatatttcagcaggcgttcaagttgtgcgtgctcatcatcgtttaacggcgcattgaggtcagcaaaatggacatactcggcgtaaatattgtgaaccgggagcctggcagcctgaaaacgtgccagcagtttgttgattcggaatgcgctcagtgcagggctaccacgcagaatttccatcataagtctctcgtcttctaagctttcggtgtacccaagggggggaaacgggcgtcattataaagaatctgatgcgctgacgaaaccgtttgcgtggaaataaaatcaccatcgtgaattagcaacgcgtgccgccaatggctgtaataagttgccatctggcgcaggtttacgcaaaatgccgctcatttatgagtaaacctttcactattattacgttttttcaagctgggacgcgcacgacacagagaattaactaattgaaaaaattaaagattaattatctgttcatcggcattctggcactgctgctcgcggtcgctctctggccatccattccctggtttggtaaagccgacaaccgtatcgccgccattcaagcgcggggagagttgcgtgtgagcaccattcatactcccctgacttataacgaaatcaacgggaaaccttttggcctggattacgaactggcgaaacagtttgccgattacctcggcgtaaaactgaaagtgaccgtgcggcagaatatcagccagctgtttgacgaccttgataatggtaacgccgacctgctggcggcaggacttgtctataacagtgagcgggtaaaaaattatcagcctggccctacctattattccgtgagtcaacaactggtttataaagtgggtcagtatcgcccacgtacgctgggcaacctgacggcggagcaactcaccgttgcaccgggtcatgtggtggttaacgatctccagaccctgaaagaaacaaaattcccggaattaagctggaaggtagacgacaaaaaaggctctgcggaattaatggaagatgtcatcgaaggaaaactcgattacaccattgctgattctgtcgccatcagcctgtttcagcgcgttcacccggagctcgccgtagcgctcgatatcaccgatgaacaaccggtgacttggtttagcccgttagatggcgataataccctttccgccgccctgctcgacttcttcaacgaaatgaatgaagacggtacgctggcacgcattgaagagaaatacctggggcatggcgatgattttgattacgtcgatacgcgcacatttttacgcgccgtcgatgcggtactgccgcagttaaagcccctgtttgagaaatacgccgaagaaattgactggcgtttgctggccgctattgcttatcaggaaagccactgggatgcacaggccactagtccgacgggtgtgcgcggcatgatgatgttaaccaaaaataccgcgcaaagcctcggcattacggatcgtaccgatgccgaacagagcatcagcggtggcgtgcgttatttgcaggatatgatgagtaaagtgccggaaagtgtgccggagaacgagcggatctggtttgccctcgctgcgtacaatatgggctatgcgcatatgctggatgcccgcgccctgacggcaaaaaccaaagggaatcctgacagttgggctgacgtaaaacagcgtctgcctttacttagccagaaaccctattacagcaagctgacttacggctacgctcgtggacatgaagcctacgcttatgtcgaaaatattcgtaagtatcagattagcctggtgggttatctgcaagagaaagagaagcaggctacagaagcggcgatgcaactggcgcaggattatccggcggtaagccctacggagttgggcaaagagaaatttccttttctcagctttctttcccagagcagtagtaactatttgacccattctccctctctgctgttttccaggaaagggagtgaagagaaacaaaattaatccgtgctggattgcgcttttttctgcgctttaatttcctggcggcgcatgcgaaagaagtcactgagcaacgccgcgcactcatccgccagtattccttccgtaatttccactcggtgattcatacccggatgatgcagcacatccattaaagatcccgcagcgccagttttcgcgtcacgcgcaccaaagaccacgcgaccaatgcgactgtggatcatcgctccggcacacattacacatggttcaagcgtgacatacaacgtggcgtcgatcagacgataattttgcatcaccagaccaccctgccgcagggccatgatttctgcatgtgcggtgggatcatggcgaccaatcgggcggttccagccttcgccgattacccgattgttatgcactaataccgcgccgaccggcacttcccgctcatcccaggcacgtttcgccagcgtcagcgcgtgacgcatccagtattcgtggctaaattcgacttcagacaaaaagaaaactccggttataaaagcgcggcgcattatacacggacgctatgctttactttattccagttgctggagttcaccgcgcggggttactcgccaacgatgctgacagaaataaagcagcggattgtcctgattactgtcgctatagccactgtacagccgcagcggagtgccgattttgcgctccagttgtgcgaccttttcatgtcccagacaacgcatcgtcaatacccaaccaccatagccacgctgaatttggctggcgataagattaacccgcggcagccagggcgtatcgaaataaaccgcttcaaccagcggctgcggagagccggtaatcaaccagatatcagcatcggaacttaacaggtaggtggttaatcgctcctgaaccagcggaaaggcggtaacattgtcgcgaaaccagcgcacgaaatcggcctgcaacgtctgtaaacgtgcttcgctgtgaccaaaagtgcacccccacagaagcagactcatcggccagcgtgccgcacgaccttttatcaataacgcaatggctataatcggtaacaacggcaggacaagtaacgcattcagcggttggcgacgtagtaaatagcgcagaaaactgccgaacatatcctgctgatgcaatgttccatctaagtcaaaaaacaccacacgacgctcgtgagttgccaaaccatattcctctggactgaaacatcctgattaattttcgctactacatagcctaacagatagatcatcacttttccggcaacaatcgaccgcatcatggctaactggaatttttaattcatggcaattagcggcaatggaatataaaattcactcgcgtgtgtctcatattgcctgttgtcgccactatttcatcgcgaggaaagatatgaacggcttacttcgtatccgtcagcgttaccaggggcttgcccagagtgataaaaaactggcggattatctgctgctacaacctgatacggcgcgccatttaagctctcagcaactggccaacgaagccggagtcagtcagtccagcgtcgtgaagttcgcgcaaaaactcggctataaaggttttccggcgcttaagttggcgttgagtgaagcgctggcaagccagccggaaagtccctccgtgcccattcataaccaaatccgcggtgatgatccgttacggctggtcggcgaaaaactgattaaagaaaatactgccgctatgtacgcaacgctaaacgttaatagtgaagagaaactgcatgaatgcgtaacaatgttgcgctctgcgcggcggataattctgaccggtattggcgctagcggtctggtggcgcaaaactttgcctggaagctgatgaagattggcttcaatgctgccgcagtgcgcgatatgcatgcgctactcgcaacagtacaggcgagctcccctgacgatctgttattagccatttcctacaccggtgtacgacgcgagttaaacctggcggcagatgagatgctgcgagtgggcggaaaagtgctggcgattaccggctttactccgaatgccctgcaacagcgtgcttctcattgcctgtataccattgccgaagaacaagcgacaaacagtgctagtatctctgcttgtcacgctcagggaatgttaacggatttgctgttcattgcgctgattcagcaggatctggaactggcaccagaacgtattcgtcatagtgaagcgctggtgaaaaaactggtctgagtaaagaatgcgcgtataatgcccgcccggtttgtgttgttttgagagtttccttatggcgttgttaatcactaaaaaatgcatcaattgtgatatgtgtgaacccgaatgcccgaatgaggcgattagtatgggagatcatatctacgagattaacagcgataagtgtaccgaatgcgtagggcactacgagacaccaacctgccagaaggtgtgcccgatccccaatactattgtgaaagatccggcgcatgtcgagacagaagaacagttgtgggataaatttgtgctgatgcaccacgcggataaaatttaatattctactctggaagtagagtattaattatattactgggaagccttaacgccattatatttatttaattgatgacattagcataatcattcactaagttaatttatatagtatctgcccagacacttatttatagttattaaaggtgcgtccgactggttcaccggacgcaccttaagtacgtttccttgtgttataagaacagaaggatcagctgtaaaacagcaatgatgattttgatgacccgtttaatcaggtatcggcaatcagtcattcgtttttccttaaacaaggaatgcagccattcagattagcccttacatctccccaaaactgaacgtgcgagttattgagggtgcatgctgcactccacaccagagctttgacgacaccactcgtttcaatgggggaattctgtggcatggtgtaaagcacagcaaaatcttcaataacgaagccaattttaatgtacttacgaattggcggtcacgttaatctttccatcaatattgctttcttcgtaaaggctcgagtttttatgctaaagattgcaagttgcttgtaaaagataagtacactgatccataatcgctgttgttgagggtgcatgctgcacaaaattaaagttaaaaagtaaaacccccgttccttaccagttcgggggttttactttttaaagagaacggtattatttttaactttcaataattaccgtggcacaagcatagtgccgctcatctgccagcgttacatgcatatttgcaacgcccagcttttccgccagttttaatgcctcgccccatagccgtagccgtggtttgccgagctcatcattgaatacttcaaattgattaaacgccagaccattgcggatcccggtgccaaacgcttttgctgcggcttctttcacagcaaaacgcttcgccagaaaacgcaccggctggtggtgcgttttccagatagcccattcgttatcgcttaatacgcggcgtgccaggcgatcaccggatcgggcgatcaccgcttcgatgcgagcgatctccacaatatccgtgcctaaacctaatattgccattagccacgcgcttccagcatcagacgcttcatttctgccaccgcatctttcagtccggtcatcactgcacgaccaataatggcatgaccgatattcagttcatgcatctcagggatggcggcaatggctttcacgttgtgataggtcagaccgtgtccggcgttaactttcagaccgaggcttgcggcaaaggtcgcggctttggcgatacgcgccagctcttgcgcctgttcggcgtcagttttggcatcagcatagcaaccggtgtggatctcgataaacggtgcgccaacctctgccgcagctttgatctgctcttcatcggcgtcaataaacagagaaacctgaatcccggcatctgccagacgtttgcaggcatcgcgcattttgtcacgctgccctgcgacatccaggccgccttcggttgttacttcctgacgcttttccggtaccaggcagcaaaaatgtggcttcgtctcaacggcgatcgccagcatctcttcggtcaccgccatctccagattcatgcgggtatccagcgtctgacgcaggatgcgcacgtcgcggtcagtaatgtgacggcgatcttcacgtaaatgcacggtaatgccgtccgctcccgcctgctcggcaataaacgcggcctgcaccggatccgggtaagcggtaccgcgcgcgttgcgcagcgtagcgatatggtcaatgttgacgcctaacagtaattcagccatgacaatcctcatcattcataatgtgttttcaccgttcgcttaggcataaactgccggaacagttccctgctctttaaaggtttaccgccaagatacggcttaagcgccatgcgggtaaagcgtttcgcggcgcgcagtgtgtctgcgtcaggaaattcccgtgcgtttaacgcttttaactgccttccggtgaacgttttattgtcgataacgacgcttgcgataaaccctttttcttcgcgataacgatacgtcatggtgtcatctaccggctcgccgctacccgcacaatgggtaaaattgacgccataacccagatgcccgagcagtgccagttcaaagcggcgcagcgcgggttctggcgtaccagtgacccctgcaagagactgaatgcagtgcaagtaatcgaaaaaaagttcagagaagcgcgtctcgtattccagtacgcgggagagaagttcgttgatgtacagaccgctgtaaagcgtgataccgcttaatggcagcgccaggctgacggcttcagcactgcgcagcgttttgacttcgccacgcccgccaaaacgtagcaagagaggggtgaaaggctgtaatgcacctttcagggtagagcgtttagagcgtgcgcctttggcaaccagacgcacgcgcccgctttcctccgtgaagacgtccagcatcaggctggtttcgctccacgggcgactatgcaggacaaatgcgcgctgccagccttccatcggagttactcttaaagatcgtcaacgtaaccgagactgcgcagtgcgcgttcgtcgtcggcccaaccggatttcacttttacccacagttcaaggtgaacaggcgcttcgaacatttcctgcatgtctttacgcgcttcaatcccgatggttttgatcttggcccctttgttgccaatgaccatcttcttctgcccttcacgctcaacgagaatcaaaccgttgatgtcataaccaccgcgttcgttagagacgaaacgttcgatctccacggtcacggagtacggcagttcagcgccgaggaaacgcatcagtttttcgcggatgatttcagacgccataaaacgctgactgcgatcggtgatgtaatcttccgggaagtgatgagtcgcttcaggtagatgcttacgcacgattgccgcaatagtgtcaacattcagcccggtttcggcagagattggcacgatatcgaggaagttcatctggcttgccaggaactgcaggtgcggcagcagatcggctttctcctgcacgttgtccactttgttcaccgcgaggattaccggcgctttgccttcgcgcagtttgttgagcaccatttcgtcgtccggcgtccagcgggtgccttcaacgacaaaaatcaccagctcaacatcgccaatagagctgctcgccgctttgttcatcaggcggttaatggcgcgtttttcttccatatgcaggcccggtgtatcgacgtagatcgcctgatacgcgccttcagtatggatccccacaatgcggtgacgagttgtctgcgccttgcgggaagtgatggagattttctgccccagcagtttgttcaacaatgtggatttgccaacgttcggacgtccgacgatggcaataaatccgcagtaacttttatcgatgctcattccagctccagttttttcaacgcctgttcggcggcagcctgctcagccttacgacggctactacctgtgccaaccaccggttcactcaggccgctgacctggcagtggatagtaaattcctgatcgtgcgcttcgccacgtacctggactaccagataagtcggcagcggcagatggcgaccctgcaaatattcttgcaagcgcgttttcggatctttttgtttatcgcctgggctaatttcgtccaaacgagtttgataccagttgaggattaatttctcgacggtttgaatatcactgtcgaggaatacgccaccaattaatgcttcgacggtgtcggcgagaatactctcacgacgaaatccaccgcttttaagttcacctggccctaaacgtaagcactcgcctaactcaaattcgcgcgccagttccgccagcgtattgccacggaccagcgtggcgcgcatccggctcatatcgccttcatccacacgagggaaacggtgataaagcgcattggcgataacgtagctcagaatagagtcgcctaaaaattctaaacgctcgttatgtttactgctggcactacgatgagttaatgcctgctgcaacagttcctgatgattaaaagtgtagcccagcttccgttgaagccgattaattacgatggggttcatgcgataccaataaataaatgcgtcaacaattcagcacacgaaacagacctgatatacatggttctgctaactgcttcgctgcagtttcagtttaccggtatatggggaccaacgctgtttcgtgtgccgtggcaacctggaggtgccaaccttaaacttcgggggaatattctatacacaacgacgggggatgtcgttagccacgggagatttatctcataaataattcacgttgtcgccataacggcgacaacgtgaacgaagatggctattaatggatgccgccaatgcgacttaagcgcagaccagtcggccattcgccttcttgcttatcgaagctcatccagatagccgttgcccgaccgaccagattcgcttccggcacaaagccccagtaacggctgtccgcgctgttgtcgcggttgtcgcccatcatgaagtattgtcccggaggaacaatccaggttgccagttgttgccctggctgctggtaatacatccccacctgatcctgcgcaatcggcactgtcagaatgcggtgcgtcacatcacccagtgtctctttacgctcggaaagacgaattccattttctttggtttcgtttttcggcacttcaaagaatccgctggtcgcttccccaccattacggcgactgaaggtctgaacgaaatcgctcggttccacgttactgtaggtgaccggcagcgcgttttcacacgcctggccggaactgcatcccggttgaatcgtcagctctttactgaccggatcgtaagtgactttatcgcccggtaaacccaccgcgcgcttgatgtaatcaagctttggatcttccggatatttaaagaccacgatatcgccgcgtttcggatgaccggtttcgatcagcgttttctggtagataggatctttaatgccataagcaaacttctctaccagaataaaatcaccaattaacagagtcggcatcatgctaccactcgggatctggaacggttcataaataaagctacgcacaatcaatacgatagccagtaccggaaaaacagaagcaccggtttccagccagccaggcttcggcgcaacctttttcaacgttgctttatccagactgtccccggcagccgcctgcgccgctgcctgacgttcccgccgtttaggtgcgaaaaagaatttatccacgcaccataaaatgcccgtcaccagtgtggcaatcaccagaatcagggcaaacatattcgccatgccaactcctaagggttatttgttgtctttgccgacgtgcagaatggcgaggaacgcttcctgcggcagctcgacgttaccgatctgcttcatgcgtttcttaccttctttctgcttctgcagcagctttttcttacggctgatatcgccgccataacatttagccagtacgtttttacgcagctgtttcacggtggatcgcgcaatgatgtgcgtaccaatcgctgcctgaatggcgatatcaaactgctggcgtgggatcagatctttcatcttctccaccaactcgcgaccgcggttttggctattatcacggtgggtgatcaacgccagcgcatcaacacgttcaccgttgattaatacgtctacacgtaccatgtcggacgcctggaagcgcttgaagttgtaatccagagacgcataaccacggctggtagatttcaggcgatcgaagaagtcgagcaccacttccgccatcgggatctcgtacgtcagcgccacctgattaccgtggtaaaccatattggtctgcacgccgcgtttttctacgcacaacgtaataacgttgccgagatatgcctgcggcagcagcatgtgacactctgcaatcggctcgcgcagttcgtagatgttatttaccgcaggcagcttggatgggctgtcgacgtagataacttctctactcgtggtttcaacttcatacactacggtcggcgcagtggtgatcagatccagatcgtattcacgttccagacgttcctggatgatctccatgtgcagcaggccgaggaagccgcagcggaaaccaaagcccagcgcgctggagctttccggctcatagaacagactggcatcgttcaggctgagtttacccagcgcgtcacggaaggcttcatagtcgtcggaacttaccgggaacagaccggcgtatacctgcggtttgactttcttaaagccaggcagcgccttttctgccggattacgcgccagcgttaaggtatcgccgactggagcgccgtggatatctttaatcgcacatacgagccagcctacttcgccacatttcagttcagtgcggtcaacctgtttcggcgtgaagatgcccagacggtcggcgttataggtctgcccggtactcatgactttcactttgtcgcccttacgcagggtgccgtttttaatacggataagactaacaacgcccaggtagttgtcgaaccaactgtcgataattagtgcctgcaacgggccttccggatcgccttccggcggcggaatgtcgcgcaccagacgttcgagaacgtcctgcacaccaacgccggttttcgcactacagcgcaccgcgtcggtggcgtcgatgccgacgatatcttcaatttcttccgccacgcgttcaggatcggctgccggcaggtcaatcttgttcagtaccggcacaacttcgagatccatttccatggcggtgtagcagtttgccagggtttgcgcttctacgccctgcccggcgtcgaccaccagcaatgcaccttcacaggcagccaggctacgggaaacttcataggagaagtctacgtggcccggggtgtcgataaagttaagctgataggtttcgccgtcagacgctttgtagtccagcgtcacgctttgcgctttgatggtaatgccacgctcacgctcaagatccatggaatcgagaacctgcgcctccatttcacggtcagacaggccaccgcagatctggataatacggtcagacagcgtgcttttaccgtggtcaatgtgagctatgatgctaaagttacgtatattcttcataaagtatgattattgtgccttaatgcccggttaaccaggcttttagaagtcgctgttctgagcttaacgtctgtattaatagaaacgccgcattctacactacaacattgaggcgaggaaatgttcataccgtatggattgtggtatctggaaacgtcctcgcatttgttatgcaaaatgcaacaaagccagtgaaatcactggctcgcgtcttcgctagatgtttcaaatcgcacaaggccaggcggcaatgccacgcttaagatgatcggttgccattctgcccgggcagcaaacttacggctgtagccgcgcgcaatcaggaacccgccaataccaccgaggatcgcaccacataatgctgcgacgtcagaagcaaagagtagctgaaataggctagcgataaggaataatcccaccagcgggctcatataaaccagtaatgcggagctaagcaggctgccttcggcgatccccaattccactttttgccccggcactaacggctcatcacagggtacgacaatggtatgcgtggtttgcgggccaagtttatttaacacgcggctaccgcaaccggcgcgactagcgcagctgctgcaactagctttaacatcacaactgaccagcgcctgcccgttttgccaggagacgacggtagcccactctttgatcattgcgctgccccgaacttaatattctcggcaatgcgtttcgccgtttgcggcggcagttcaccgacaatggtgatttcggcgttatcacgtacgcttgtactgacggttctgcgtccggtgcgcaacatctgatcggtgctgcttggcgtagcgcggttaacgtttacgctgaagctgaataatccgtcggaatagagacgactttcgataggcatgttgtccatcgtcggtagcggacgtcgactactggaaacttcgctaaaaccctgtggcaaccaggttggcgtccagctgaatttagctttttcacctacaggaacagaaagcaacggcggcaaatttgccttcgccagcgtctgcatactgctgctgatatcctgattgacgttaaaagcaatcacgcgaaattgttccagcgtttcaccatcgcgatcaaggagatcaacccgcatcggtaatttgctttcggtgtccatccacacgatgtagctgtagcgtgtaccatctcgggcaaccacgcgaatgacttcgcaaagacgatcagcaatacgcgtgcgcccgacggagataaagtcgtagtaaggagaaaggcgtttgaaatcggtatagataaggcttggcagagaatcaacaatgtaatcgccattaagcgtgaacggttcaagtcccggttcaaaatagctgatttcattgccgcgctgtaccacttcccggcgcgggccatccatttgcaacaattgtgcaagaggacggttatcgaggcgtgcatgtcgataacgcagagactcaacaccctgtttattgatgctgatgaaactcagctcgtaattcagactctgactggccaggttcatctgctgtaataacgccccggacgcgggagtggcgctggcgttagcagagaataacaggctacctgtcactaaactcatggcaaaccaaagttgcttcattactggctttgcgttcctaaagtttgaattcctggcacctgtacagcggcttgctgggtttgcgcctgctcaaactgaagctgttcagagtggagtcggcgttgcagttcgtaatcctgcaacattgcattaatgcgacgacgctgctcctgtacctgctgctgttgaccattgtttgcggtcgcttcagaaggtactcccaggcttaccgggctggctttacccatcatcggcagtgtattaaataccggcgtttcgggctgctgggacgtttcagattgtccattatagtgctggacgccaacgataactgcaaggcttacgcatgcggctacgcccatttgggtaagctgtgccgcccacggacgtactttctgccagaatggcattttctgccattgatgcggcgcaggctgggcttccgggatcaatgtcgccggttgacgtactggctcttcttcaatggcggccatcacgcgactagagatatcgaaatggagcacctcgggagtatcaccccgcatactgtcacggattaagtgatagctttcccaggttttctgcatttctgggttatgagccagttcgttaagcagctcactatccagcgtttcgccatccattaaagcggaaagttgttctttctgcatgcctaatacccttatccagtatcccgctatcgtcaacgcctgataagcggttgaactttgttatcaatagcttccctcgctcggaagatacgactacgcaccgtacctaccggacaatccatgatagcggctatctcttcatagctcaggccatccagctcccgcaaggttattgccatgcgtaaatcttccgggagggactcaatagttcggaaaactatctgtctcagttcttcactcaacattaagttctcagggttgctaatttctttcaacgcgccgccactttcgaagttttcagcttcaatggcatccacatcactggaaggtggacgacgcccctgagcaaccaggtaatttttcgctgtatttacagcaatccgatacagccatgtataaaaagcgctatctccccggaagctatccagcgcacgataggctttaataaaagcttcttgtaccacatcgggaacatcaccgctcggcacatagcgggaaaccagactcgccactttatgctgatagcgcactaccagtaagttaaaggctttctgatctcccttctggacccgttcaaccaggacctggtccgttaactgctcgctcatccgaggtaaagtctccccaaaccaaatttccacgcgctatcgaaacgccactccattagctgcaatttgagcaagcaaagggttagagtgtctcgtttttgtaaagttccgtaacgcatctgtttttgtttgtcatgctgtagacggatcattatctatcattataagtctacagaatctgaacatcgcattatctgtgtagaaatgcccatttaactgcctgaagagtaacccaacggcctttttatttcaccacctaatcctccaccagccagtaacttctctttttctcgccgccctgcgtcagcgtgtttagcaactgtaacaaatattaaaatagcaggtgtttatccgcacaacatgatgctatgctgaccaaaccatgtttagtaaattaaacaaagaaaatgaatactctccctgaacatagttgtgacgtgttgattatcggtagcggcgcagccggacttagtctggcgctacgcctggctgaccagcatcaggtcatcgttctaagtaaaggcccggtaacggaaggtagtacattttatgcccagggcggtattgccgccgtgtttgatgaaactgacagcattgacagccatgtggaagacacattgattgccggggctggtatttgcgatcgccatgcagttgaatttgtcgccagcaatgcacgatcctgtgtgcaatggctaatcgaccagggggtgttgtttgatacccacattcaaccgaatggcgaagaaagttaccatctgacccgtgaaggtggacatagtcaccgtcgtattcttcatgccgccgacgccaccggtagagaagtagaaaccacgctggtgagcaaggcgctgaaccatccgaatattcgcgtgctggagcgcagcaacgcggttgatctgattgtttctgacaaaattggcctgccgggcacgcgacgggttgttggcgcgtgggtatggaaccgtaataaagaaacggtggaaacctgccacgcaaaagcggtggtgctggcaaccggcggtgcgagcaaggtttatcagtacaccaccaatccggatatttcttctggcgatggcattgctatggcgtggcgcgcaggctgccgggttgccaatctcgaatttaatcagttccaccctaccgcgctatatcacccacaggcacgcaatttcctgttaacagaagcactgcgcggcgaaggcgcttatctcaagcgcccggatggtacgcgttttatgcccgattttgatgagcgcggcgaactggccccgcgcgatattgtcgcccgcgccattgaccatgaaatgaaacgcctcggcgcagattgtatgttccttgatatcagccataagcccgccgattttattcgccagcatttcccgatgatttatgaaaagctgctcgggctggggattgatctcacacaagaaccggtaccgattgtgcctgctgcacattatacctgcggtggtgtaatggttgatgatcatgggcgtacggacgtcgagggcttgtatgccattggcgaggtgagttataccggcttacacggcgctaaccgcatggccagcaatagtttgctggagtgtctggtctatggctggagcgcggcggaagatatcaccagacgtatgccttatgcccacgacatcagtacgttaccgccgtgggatgaaagccgcgttgagaaccctgacgaacgggtagtaattcagcataactggcacgagctacgtctgtttatgtgggattacgttggcattgtgcgcacaacgaagcgcctggaacgcgccctgcggcggataaccatgctccaacaagaaatagacgaatattacgcccatttccgcgtcagtaataatttgctggagctgcgtaatctggtacaggttgccgagttgattgttcgctgtgcaatgatgcgtaaagagagtcgggggttgcatttcacgctggattatccggaactgctcacccattccggtccgagcatcctttcccccggcaatcattacataaacagataaaaagcctgggtcagcgccgtatacgcttcggaatagttctggtctggcccacgaatgactaagcgatcgctaaagcattctcccgcctgcggggagaatgccagcagcacccgatgcggcagtcgcgcttcgttttccgccacatccgtccgcaaacgtaaatgccagcccatgcttaatgccagctccgtaaaaccattaccaatctgctctggcagcactacgcagaaaaatccctcttcggtaatgcactccgccgcacaggtcagcaagcttgggtgatcaagcgtagtggtatagcgagcctgttcccgttgaggtgtgctgcactctactccctgctgatagtaaggtgggttactgatgattaaatcgaagcgtactgtctgctgtgtaatccactgctgaatatccgccgtatggacgttaatccgctctgcccacggggactggttgatattttcctgcgcctgcgcggcagcttcactttccagttcaactgcatcaatcatcacgctgtcatcggttcgctgcgccagcattaatgccagcaacccgctacccgcgccgatatcaaggcaacgttttaccccagccaccggtgcccatgcgcccaataaaataccatccgttcccactttcatcgcacagcgatcgtgagcaacaaaaaactgtttaaaagtaaatccattacgacgaagcacggatgtagactgactcatgaaaataaaaccttgcaggaaaaacggcgatagcaccgggtgagaacaatacccgagaagcgatatccatacaaacagatgaagattgcagccgtaacgtctataatcagcgccccacacagaggtagaacatgactgtaacgactttttccgaacttgaactcgacgaaagcctgctggaagccctccaggataaaggtttcactcgcccgaccgccattcaggctgccgccattccgcctgcgctcgatggccgtgatgtactcggttctgcgccgacaggcaccggtaaaacggcggcgtatctgctgccagcgttgcagcacctgctcgatttcccgcgtaagaaatccggtccgccgcgtattttgatcctcaccccaactcgcgagctggcgatgcaggtgtccgatcatgcccgcgaactggcgaaacatacgcatctggatatcgccaccatcaccggcggcgtagcctatatgaaccacgcggaagtgttcagcgaaaatcaggacatcgtggtcgccacgaccggacgtctgctgcaatacataaaagaagagaacttcgattgccgcgcggttgaaacgctgatcctcgacgaagcagaccgtatgctggatatgggcttcgctcaggatatcgaacatattgctggcgaaacgcgctggcgtaaacagaccctgctctttagcgcaacgctggaaggcgatgcgattcaggactttgccgagcgtctgctggaagatccggtggaagtttctgccaatccctccacccgtgagcgcaaaaaaattcatcagtggtattaccgcgccgatgatcttgagcataaaaccgcgttgctggtgcatctgttaaaacagccggaagcgacccgcagtattgtgtttgtgcgtaagcgtgagcgtgtgcatgagctggcaaactggctgcgcgaagcgggcatcaacaactgctatctcgaaggtgagatggtacagggcaagcgtaacgaagcgatcaagcgtttgaccgaaggtcgcgtaaacgtactggtcgcaaccgatgttgccgcgcgcggtatcgacattcctgacgtcagccacgtctttaacttcgatatgccgcgcagtggcgatacttatttgcaccgtatcggacgtaccgcgcgcgccggtcgtaaaggcaccgcaattagcctggtggaagcccatgaccatctgctgctgggtaaagtaggccgctatattgaagagccaattaaagctcgcgttattgatgagttacgcccgaaaacgcgtgcgccaagcgaaaagcagaccggcaagccaagcaagaaagtactggctaaacgtgctgagaagaaaaaagctaaagagaaagagaagccgcgggtgaaaaaacgccatcgcgacaccaaaaatattggtaagcgccgtaaaccaagcggaacgggcgtgccaccgcaaacgacagaagagtaatctcaatgccaggtttaagcctggtattaaaagtgctggcaaacgcaaaactgcctgatgcgctacgcttatcaggcctacgtggctcatgcaatatattgaatttgcacgatcttgtaggccggataaggcgttcacgccgcatccggcatgaataaagcgcactttgtcgacaagttaaatgccgggtttaatcccgacattatttttatccagccacaaaactctcttcaacacactgaataaaagtgtgcatcgccgggctaaccgcttttccagcatgatgtgcgcacatggccgtaatggtctggctctgttcgccaaaaggcaattcaattaattctccgcactccaactcttttgccaccgcaaagcgcggtaggtagctgaccccgatattcgccgcgacacaacgcttgatgctttcgatacttataagctcaatggtgttttccaccgtgatccgccgctgacgcagcgtgctctcaaatatctgccggaagacacattgcggttcgttgataataaagctacaggcgttatgtcttcccggctcagtaaaatcgacatctgcaatttgcggactagccaccagcaccagactttgttcacccaactctcgtcgattcagagcatcatcattccctacacgataaaagacgccaacatcggcctcatcattcagtagcgcatcacggatcacgtaacagttcaggctctgcaagcttaaacgcacttttggggcgcgttgccgaaaacgctgcaacacctgcggcattcggtaagagagcaacgtttcgccgctaacaacgcgtagttccccgtccggatcactctcctttttggcagcctcacgaagcgtatccatcactcgggtaagttcataaatgtgcggcagcaacttttttccttcgcgggtaaggcacatccgtcggccaattttctcaaataactggacactaaactcctgctcaagctgctgaatatgaaaagtcaccgtgctttgtgtacagcacaatttttggctagctcgcaaaaaggaaccctcttccaccacggttttaagcgtaataaaacggcgcagatccataaccccaaacctatcgaaaatatcgaatctagaatataaaaacattcatttttttaaatgttccgtgtcgggtactgtctaccaaaacagaggagataacaagtgacaccgacccttttaagtgctttttggacttacaccctgattaccgctatgacgccaggaccgaacaatattctcgcccttagctctgctacgagccatggatttcgtcaaagtacccgcgtgctggcagggatgagtctgggatttttgattgtgatgttactgtgtgcgggcattagttttagtctggcagtgattgacccggcagcggtacaccttttgagttgggcgggggcggcatatattgtctggctggcgtggaaaatcgccaccagcccaacaaaggaagacggacttcaggcaaaaccaatcagcttttgggccagctttgctttgcagtttgtgaacgtcaaaatcattttgtacggtgttacggcactgagcacgtttgttctgccgcaaacacaggcgttaagctgggtagttggcgtcagcgttttgctggcgatgattgggacgtttggcaatgtgtgctgggcgctggcggggcatctgtttcagcgattgtttcgccagtatggtcgccagttaaatatcgtgcttgccctgttgctggtctattgcgcggtacgcattttctattaacgaaaaaaagcggaagaggtcgccctcttccgcttagtaacttgctacttaagccttacaggctttcagtaaaggtacgagcgataacgtcgcgctgctgttccggagtcagagagttaaagcgaactgcataaccggatacacggatggtcagctgcggatatttttccggatgcttaactgcatcttccagagtttcgcgacgcagaacgttaacgttcaggtgttgaccaccttcaacgcgaacttctggtttcacttctactggaacttcacggtattcaatgtcacccagtttgcttactgcaaccacttcatcttctgcataacctgcttttgcaacgatgcaacgcgcttcgcctttttcgctgtccagcagccagaaagagttcagcagatcgtcgttagcggctttagtaatctggatacctgtaatcatgtgatgcctccccggcaaaattatttgatttgttcagcctgtcgcggccaattggtaaaaccattgttgcttgagtgtatatatactcctcaaacacccttgaatctttgatttaaatcaataaaaaccacacatcaagtatggtcgcaaatggattttattgttttacatcaacttatgcgggtgtgaaattttaccaatttacatttttttgcactcgtttaagtctaaaaaatgagcatgattttgttctgtagaaagaagcagttaagctaggcggattgaagattcgcaggagagcgagatggctaacgaattaacctggcatgacgtgctggctgaagagaagcagcaaccctattttcttaatacccttcagaccgtcgccagcgagcggcagtccggcgtcactatctacccaccacaaaaagatgtctttaacgcgttccgctttacagagttgggtgacgttaaagtggtgattctcggccaggatccttatcacggaccgggacaggcgcatggtctggcattttccgttcgtcccggcattgccattcctccgagtttattgaatatgtataaagagctggaaaatactattccgggcttcacccgccctaatcatggttatcttgaaagctgggcgcgtcagggcgttctgctactcaatactgtgttgacggtacgcgcaggtcaggcgcattcccacgccagcctcggctgggaaaccttcaccgataaagtgatcagcctgattaaccagcatcgcgaaggcgtggtgtttttgttgtggggaagccatgcgcaaaagaaaggggcgattatagataagcaacgccatcatgtactgaaagcaccgcatccgagcccgcttagcgcgcatcgtggattctttggctgcaaccattttgtgctggcaaatcagtggctggaacaacgtggcgagacgccgattgactggatgccagtattaccggcagagagtgagtaaatttgcggggaaatgccggatggcagagttgccacccggctgatttatcaggctttattctgacgccaccattcaccaagcaaaacgccggttgcgacagagatattcagcccggcaacgttgcccgtaccgtcaatcttcacgcgcagatcgttcggatcgcgtgcggcatccggtaacccttcatattcctgacccagcaccagtaccattttcgctggcagactagttttgaacagcggtttaccctgctcgctggaagtggtcactacggtgtaacctgcctgacggaaatcatccagcacgttaacaatgttgtcgccagtaatcggctgaacgtgctctgcgccgccttctgcggtacggatagccgccccgctctccagcagtgccgcatcctgcaccacgacacctttcacgccgaagtgcgcgcagctgcgcatcatgccacccaggttatgcgggttagattcgttttccagtgccagaacgcaatcctgcgcgcctgcctggcttacccactgctgcacggttgtaccgttacgctttttgatcaagaagcaaacgccgccgtgatgttccgtgccactcgcttttgtcaattccgcttcatccaccacatggtacgctttgcggtttgctgccatccagcgcaaagcttctttaaaacgcggcgttacactctggataaaccaggcgcgaacaatcgcttccggacggctctggaaaagtgcctgacatgcattttcgccgtagacgcgggtttcttccgcacgctgacgacgcaacacttccggatcaataaaacttttaccactgatgccaccgtgatcggccttttccggcgtctcatcacccggcgcgcgggaaaccgtgcgccacgggctatcttcccacttgcggtcacggggctgactctgtttgtcatcgcgggcggggcgacggccaccgtcagcacgagattttcctggacgcccgccccctttcccggtacgcgggttgtgggtacgtttatcagaatcatcatcactgcggacatacatcactttgaccttgccgcttttacctttcatttcatcgttcatgcttttctccaccagcgctgcgcgaagcgcgcagattacccgaagtccgcgcggttcgccatgatttcgtaccaaagcctgcgactatcatacctattgaataaaacagattgttgtctggaacaatgtccccgataatatgtaacatattagaaacataccggcgtcgttgccgataagtctccttactcatcccgaggttagttatgaataccgtttgtacccattgtcaggccatcaatcgcattcccgacgatcggatcgaagatgcggcaaaatgcggacgctgcggtcacgacttgtttgacggagaggtgattaatgcgaccggtgaaacactcgacaaattgctgaaggatgatctacctgtggtgatcgacttctgggcaccgtggtgcggcccctgccgtaatttcgcaccaatttttgaagatgtcgcgcaagagcgtagcggtaaagtgcgctttgtgaaagtgaataccgaagctgaacgtgaattgagcagtcgctttggaattcgtagtataccgacgatcatgattttcaaaaacggtcaggttgtcgacatgcttaatggcgcagtaccgaaagcgccgttcgatagctggctgaacgaatctctttaatcttaccggggcgcatcttgtgccccgttttctcctctgcgacaatggcgttttttcgacgctctcttatgaccgaaaacgctgttctccagttacgcgccgagcgtattgcgcgcgcaacacgtccttttcttgcccgcggtaatcgcgttcgtcgctgccaacgctgtcttttgccagagaaattatgtctctgtagcacaattaccccagcacaagcaaaaagtcgcttctgtttgctgatgttcgacaccgagccaatgaagcccagtaataccgggcgtctcattgctgatattttgcctgataccgttgcgtttcaatggagccgtaccgaacccagccaggatttgctggagttggtgcaaaacccggactatcagccaatggtggtctttcccgctagctatgctgatgagcaacgggaagtgatcttcacaccacctgccggtaagccaccgctgtttatcatgctcgatggtacctggccggaagctcgcaagatgtttcgtaaaagtccgtatctggataatcttcccgtcatttccgtcgatctttcccggctttctgcctatcgcctgcgtgaagcccaggctgaaggccaatattgtactgccgaggtagccatcgcactgttagatatggccggcgataccggggcggcggcagggttaggcgagcattttacccgctttaaaacacgctatctggcaggaaaaacgcaacatctgggtagcatcacagcagaacagttagaaagcgtttaaaatcattcggtcacttctgcgggagaccggtatgagtcagcgaggactggaagcactactgcgaccaaaaagcatagcggtaattggcgcgagcatgaaacccaatcgcgcaggttacctgatgatgcgtaacctgctggcgggaggctttaacggaccggtactcccggtgacgccagcctggaaagcggtgttgggtgtgttggcctggccggatattgccagcttgccctttacacccgaccttgcggttttatgtaccaatgccagccgtaatcttgctcttctggaagagctcggcgagaaaggctgtaaaacctgcattattctttccgccccggcaagccaacacgaagatctccgcgcctgcgccctgcgccataacatgcgcctgcttggaccaaacagtctgggtttactggctccctggcaaggtctgaatgccagctttagccctgtgccgattaaacgcggcaagctggcgtttattagccaaagcgctgccgtctccaacaccatcctcgactgggcgcaacagcgtaagatgggcttttcctactttattgcgctcggcgacagcctggatatcgacgttgatgaattgcttgactatctggcacgcgacagtaaaaccagcgccatcctgctctatctcgaacagttaagcgacgcgcgacgctttgttagcgcggcccgtagtgccagccgtaataaaccgattctggtgattaaaagcggacgtagcccggcggcacagcgactgctcaacacgacggcaggaatggacccggcatgggatgcggctattcagcgtgccggtttgttgcgggtacaggacacccacgagctgtttagcgcggtggaaacccttagccatatgcgcccgctacgtggcgaccggctgatgattatcagcaacggtgctgcgcctgccgcgctggcgctggatgccttatggagtcgcaatggcaagctggcaacgctaagcgaagaaacctgccagaaactgcgcgatgcactgccagaacatgtggcaatatctaacccgctcgatctacgcgatgacgccagcagtgagcactatattaaaacgctggatattctgctccacagccaggattttgacgcgctgatggttattcatagccccagcgccgctgctcccgcaacagaaagcgcgcaagtattaattgaagcggtaaagcatcatccccgcagcaaatatgtctctttgctgacgaactggtgcggcgagcactccagccaagaggcacgacgtttattcagcgaagccgggctgccgacctaccgtaccccggaaggaaccatcactgcttttatgcatatggtggagtaccggcgtaatcagaagcaactacgcgaaacgccggcgttgcccagcaatctgacttccaataccgcagaagcgcatcttctgttgcaacaggcgattgccgaaggggctacgagcctcgatacccatgaagttcagcccatcctgcaagcgtatggcatgaacacgctccctacctggattgccagcgatagcaccgaagcggtgcatattgccgaacagattggttatccggtggcgctgaaattgcgtagcccggatattccacataaaagcgaagttcagggcgtcatgctttacctgcgtacagccaatgaagtccagcaagcggcgaacgctattttcgatcgcgtaaaaatggcctggccacaggcgcgggtccacggcctgttggtgcaaagtatggctaaccgtgctggcgctcaggagttgcgggttgtggttgagcacgatccggttttcgggccgttgatcatgctgggtgaaggcggtgtggagtggcgtcctgaagatcaagccgtcgtcgcactgccgccgctgaacatgaacctggcccgctatctggttattcaggggatcaaaagtaaaaagattcgtgcgcgcagtgcgctacgcccattggatgttgcaggcttgagccagcttctggtgcaggtttccaacttgattgtcgattgcccggaaattcagcgtctggatattcatcctttgctggcttctggcagtgaatttaccgcgctggatgtcacgctggatatcagcccgtttgaaggcgataacgagagtcggctggcagtgcgcccttatccgcatcagctggaagaatgggtagaattgaaaaacggtgaacgctgcttgttccgcccgattttgccagaagatgagccacaacttcagcaattcattagccgagtcaccaaagaagatctttattaccgctactttagcgagatcaacgaatttacccatgaagatttagccaacatgacacagatcgactacgatcgggaaatggcgtttgtagcggtacgacgtattgatcaaacggaagagatcctcggcgtcacgcgtgcgatttccgatcctgataacatcgatgccgaatttgctgtactggttcgcagcgatctcaaagggttaggcttaggtcgacgcttaatggaaaagttgattacctatacgcgagatcacggactacaacgtctgaatggtattacgatgccaaacaatcgtggcatggtggcgctagcccgcaagctcgggtttaacgttgatatccagctcgaagaggggatcgttgggcttacgctaaatcttgcccagcgcgaggaaagttgagtaaggtactggaaatgttgaccacttaatcgggactggtgttattattgcccgcttatgtcgtctgcattgcacagaggacccttcaatgaacagagaagaaatgcactgtgatgttgagtaaatttaagcgtaataaacatcaacaacaccttgcccaactacccaagatttctcaaagtgttgatgatgtcgatttcttttacgctcccgccgacttccgggagacgctgctggaaaaaatagccagcgcgaagcagcgcatttgcattgtcgccctgtatctcgaacaggatgacggtggcaaaggcattctgaacgcgttgtatgaggctaaaaggcagcgtccggaactggatgtgcgggtgctggtcgactggcatcgtgcacaacgtggacgcattggcgctgcggcatctaacactaacgctgactggtactgccgcatggcgcaggaaaatccgggcgtagatgttccggtttatggcgttccaatcaatactcgtgaagcccttggtgttctgcactttaaaggctttatcatcgacgatagcgtactttatagcggtgccagcctgaacgatgtttacctgcatcagcacgataaatatcgctacgaccgttatcatctgatccgtaaccgtaagatgagtgacattatgtttgaatgggttacacagaatattatgaatggccgcggcgttaatcgtctggatgatgttaatcggccaaaaagcccggaaatcaagaacgatattcgtctgttccgccaggagctgcgtgatgccgcttatcatttccagggcgatgccgacaacgatcagctttctgtaacgccgctagtggggctggggaaaagcagtctgttgaacaagaccattttccatcttatgccttgtgccgagcagaaactaaccatctgtacgccatacttcaacctgccagcaatccttgtgcgcaatattatccagttgctgcgcgaagggaaaaaggtcgaaattattgttggtgataaaaccgcgaatgacttctacattccggaagatgaacctttcaagataattggcgcattgccttatctctatgagatcaatctgcgtcgtttcctgagccgtttgcagtattacgtcaatactgaccagctagtggttcggttatggaaagatgacgacaacacctatcacctgaaagggatgtgggttgatgataagtggatgttgatcaccggtaataacctgaacccgcgcgcctggcgtctggatctggaaaacgccattttgatccacgatccgcaacttgagctggcgccacagcgagagaaagaactggagctgatccgcgagcataccaccatcgttaagcactatcgcgatctgcaaagtattgccgattatccggtgaaggttcgtaaactcatccgccgtttgcgccgtatccgcatcgaccgattaattagccgcatcctgtaatcacaaccccgtcctgtacggggtttgttttttggaggccacgttttgcgtattctttttgtctgttcgctattgttactttctggatgcagccatatggctaacgatagctggagcgggcaggataaagctcaacactttatcgccagcgcgatgctttccgccgccggaaatgaatatagtcagcatcaggggatgagccgggatcgcagtgccatgtttggattgatgttctctgtcagtttgggggcgagtaaagagctttgggatagccgccccgaagggagcggctggagctggaaggatttggcctgggatgtcgccggtgcaagcaccggctataccgtctggcaactgacccgtcattaaagacgcatccccttccctttgcgatgtagcatcaaagaaaccagaaacgccaccacggccatcaaggtcacataccagaagaaggctgtttccattcctatacttttcaggctcaacgctacgtactccgcgctaccaccaaatatagcattagcgaccgcataactcagaccaacgcctaatgcgcgaacctgtgccgggaacatctcagccttcagtattccactgatacttgtataaaaactcactatcagcagggcacacatcaccagaccaaaagcggcataagggctggaaacgttttgcaatgcactgagaataggaacggtaaaaatggctgccaggctaccgaaacataacatactggtacggcgaccaatcttatcgctcagcgcgccaatgagtggttgaataagcatgaatacaaacaatgcggcagtcataatgccactcgccacgttggcatgcattcccgcagtatttaccagatacttctgcatataagtagtgaaggtatagaaacaaagggagcccgcagcggtaaaaccgagaaccatgatgaatgcacggcgattgcgccataatcctttcagagatccagcttcttttaaagcgcgcgtttcttgttggctagtttcatctaactgacgacgtaaccacaacgccacaacagctaacacagctcctaacgcgaaaggaatacgccatccccactctctgagtgcagcgtcttccatggtgtgttgtaaaaccacgacaaccagtagggctagcagttgtccgccgatcaacgtcacatactgaaaacttgcgtaaaaacctttgcgcccttcaacggcaacttcactcatataggtggcgctggtgccatattctccgccaacagataatccctgaaataaacgagcgagaagcaataatgccggagcccacgtacctatagtttcataacctgggaggcaggcgataaccaggcttccgaaacacatcatacacacgcttaacagcatgctttttttgcgaccatgtttatcggctatgcggccaaatagccaaccgcctattgggcgcatcaggaatcccgcagcaaaaacacctgctgtttgtagtagttgagtcgtcgtgttcccggaagggaagaagatgtgggcaaagtagagactacagaagctgtagacatagaaatcgaaccactcgaccagattaccactagaggcccccacaatcgcccaaatgcggcgacgagtatcactacttgtcagtttgctgtctgccgttacagtactttcagccatgccattatgtctcctgccgtaatccgatgcttttgtcggtcgcttttgtttattttttttgtaaaggaaatattatacatttgttgcatatcattatgcaaccttaaccatgaatttagttagcaggaaaatggttattgaggagcttaaggataaatttctggtaaggaggacacgtatggaagtgggcaagttggggaagccgtatccgttgctgaatctggcatatgtgggagtataagacgcgcagcgtcgcatcaggcatttttttctgcgccaatgcaaaaaggccatccgtcaggatggcctttcgcataatttgatgcctggcagttccctactctcgcatggggagaccccacactaccatcggcgctacggcgtttcacttctgagttcggcatggggtcaggtgggaccaccgcgctacggccgccaggcaaattctgttttatcagaccgcttctgcgttctgatttaatctgtatcaggctgaaaatcttctctcatccgccaaaacagcttcggcgttgtaaggttaagcctcacggttcattagtaccggttagctcaacgcatcgctgcgcttacacacccggcctatcaacgtcgtcgtcttcaacgttccttcaggacccttaaagggtcagggagaactcatctcggggcaagtttcgtgcttagatgctttcagcacttatctcttccgcatttagctaccgggcagtgccattggcatgacaacccgaacaccagtgatgcgtccactccggtcctctcgtactaggagcagcccccctcagttctccagcgcccacggcagatagggaccgaactgtctcacgacgttctaaacccagctcgcgtaccactttaaatggcgaacagccatacccttgggacctacttcagccccaggatgtgatgagccgacatcgaggtgccaaacaccgccgtcgatatgaactcttgggcggtatcagcctgttatccccggagtaccttttatccgttgagcgatggcccttccattcagaaccaccggatcactatgacctgctttcgcacctgctcgcgccgtcacgctcgcagtcaagctggcttatgccattgcactaacctcctgatgtccgaccaggattagccaaccttcgtgctcctccgttactctttaggaggagaccgccccagtcaaactacccaccagacactgtccgcaacccggattacgggtcaacgttagaacatcaaacattaaagggtggtatttcaaggtcggctccatgcagactggcgtccacacttcaaagcctcccacctatcctacacatcaaggctcaatgttcagtgtcaagctatagtaaaggttcacggggtctttccgtcttgccgcgggtacactgcatcttcacagcgagttcaatttcactgagtctcgggtggagacagcctggccatcattacgccattcgtgcaggtcggaacttacccgacaaggaatttcgctaccttaggaccgttatagttacggccgccgtttaccggggcttcgatcaagagcttcgcttgcgctaaccccatcaattaaccttccggcaccgggcaggcgtcacaccgtatacgtccactttcgtgtttgcacagtgctgtgtttttaataaacagttgcagccagctggtatcttcgactgatttcagctccatccgcgagggacctcacctacatatcagcgtgccttctcccgaagttacggcaccattttgcctagttccttcacccgagttctctcaagcgccttggtattctctacctgaccacctgtgtcggtttggggtacgatttgatgttacctgatgcttagaggcttttcctggaagcagggcatttgttgcttcagcaccgtagtgcctcgtcatcacgcctcagccttgattttccggatttgcctggaaaaccagcctacacgcttaaaccgggacaaccgtcgcccggccaacatagccttctccgtccccccttcgcagtaacaccaagtacaggaatattaacctgtttcccatcgactacgcctttcggcctcgccttaggggtcgactcaccctgccccgattaacgttggacaggaacccttggtcttccggcgagcgggcttttcacccgctttatcgttacttatgtcagcattcgcacttctgatacctccagcatgcctcacagcacaccttcgcaggcttacagaacgctcccctacccaacaacgcataagcgtcgctgccgcagcttcggtgcatggtttagccccgttacatcttccgcgcaggccgactcgaccagtgagctattacgctttctttaaatgatggctgcttctaagccaacatcctggctgtctgggccttcccacatcgtttcccacttaaccatgactttgggaccttagctggcggtctgggttgtttccctcttcacgacggacgttagcacccgccgtgtgtctcccgtgataacattctccggtattcgcagtttgcatcgggttggtaagtcgggatgacccccttgccgaaacagtgctctacccccggagatgaattcacgaggcgctacctaaatagctttcggggagaaccagctatctcccggtttgattggcctttcacccccagccacaagtcatccgctaatttttcaacattagtcggttcggtcctccagttagtgttacccaaccttcaacctgcccatggctagatcaccgggtttcgggtctataccctgcaacttaacgcccagttaagactcggtttcccttcggctcccctattcggttaaccttgctacagaatataagtcgctgacccattatacaaaaggtacgcagtcacacgcctaagcgtgctcccactgcttgtacgtacacggtttcaggttctttttcactcccctcgccggggttcttttcgcctttccctcacggtactggttcactatcggtcagtcaggagtatttagccttggaggatggtccccccatattcagacaggataccacgtgtcccgccctactcatcgagctcacagcatgtgcatttttgtgtacggggctgtcaccctgtatcgcgcgcctttccagacgcttccactaacacacacactgattcaggctctgggctgctccccgttcgctcgccgctactgggggaatctcggttgatttcttttcctcggggtacttagatgtttcagttcccccggttcgcctcattaacctatggattcagttaatgatagtgtgtcgaaacacactgggtttccccattcggaaatcgccggttataacggttcatatcaccttaccgacgcttatcgcagattagcacgtccttcatcgcctctgactgccagggcatccaccgtgtacgcttagtcgcttaacctcacaacccgaagatgtttcacttcagagttgcgaaaatttgagagactcacgaacaactttcattgttcagtgtttcaattttcagcttgatccagatttttaaagagcaaatatatcaaacaagacttaacagtctgttttgagatattgaggtcggcgactttcactcacaaaccagcaagtggcgtcccctaggggattcgaacccctgttaccgccgtgaaagggcggtgtcctgggcctctagacgaaggggacacgaaaattgcttatcacgcgttgcgtgatattttcgtgtagggtgagctttcattaatagaaagcgaacggccttattctcttcagcctcactcccaacgcgtaaacgccttgctattcacttttcatcagacaatctgtgtgagcactgcaaagtacgcttctttaaggtaaggaggtgatccaaccgcaggttcccctacggttaccttgttacgacttcaccccagtcatgaatcacaaagtggtaagcgccctcccgaaggttaagctacctacttcttttgcaacccactcccatggtgtgacgggcggtgtgtacaaggcccgggaacgtattcaccgtggcattctgatccacgattactagcgattccgacttcatggagtcgagttgcagactccaatccggactacgacgcactttatgaggtccgcttgctctcgcgaggtcgcttctctttgtatgcgccattgtagcacgtgtgtagccctggtcgtaagggccatgatgacttgacgtcatccccaccttcctccagtttatcactggcagtctcctttgagttcccggccggaccgctggcaacaaaggataagggttgcgctcgttgcgggacttaacccaacatttcacaacacgagctgacgacagccatgcagcacctgtctcacggttcccgaaggcacattctcatctctgaaaacttccgtggatgtcaagaccaggtaaggttcttcgcgttgcatcgaattaaaccacatgctccaccgcttgtgcgggcccccgtcaattcatttgagttttaaccttgcggccgtactccccaggcggtcgacttaacgcgttagctccggaagccacgcctcaagggcacaacctccaagtcgacatcgtttacggcgtggactaccagggtatctaatcctgtttgctccccacgctttcgcacctgagcgtcagtcttcgtccagggggccgccttcgccaccggtattcctccagatctctacgcatttcaccgctacacctggaattctacccccctctacgagactcaagcttgccagtatcagatgcagttcccaggttgagcccggggatttcacatctgacttaacaaaccgcctgcgtgcgctttacgcccagtaattccgattaacgcttgcaccctccgtattaccgcggctgctggcacggagttagccggtgcttcttctgcgggtaacgtcaatgagcaaaggtattaactttactcccttcctccccgctgaaagtactttacaacccgaaggccttcttcatacacgcggcatggctgcatcaggcttgcgcccattgtgcaatattccccactgctgcctcccgtaggagtctggaccgtgtctcagttccagtgtggctggtcatcctctcagaccagctagggatcgtcgccttggtgagccgttaccccaccaacaagctaatcccatctgggcacatccgatggcaagaggcccgaaggtccccctctttggtcttgcgacattatgcggtattagctaccgtttccagtagttatccccctccatcaggcagcttcccagacattactcacccgtccgccactcgtcagcgaagcagcaagctgcttcctgttaccgttcgacttgcatgtgttaggcctgccgccagcgttcaatctgagccatgatcaaactcttcaatttaaaagtttgatgctcaaagaattaaacttcgtaatgaattacgtgttcactcttgagacttggtattcatttttcgtcttgcgacgttaagaatccgtatcttcgagtgcccacacagattgtctgataaattgttaaagagcagtgccgcttcgctttttctcagcggcgcggggtgtgcataatacgccttcccgctacagagtcaagcatttctttgcttttctctgttgagattctcaggagaaccccgccgacccggcggcgtgtttgccgttgttccgtgtcagtggtggcgcattatagggagttattccggcctgacaagcgaaaaatataaaaactttatcgttcgctcacttttcaggcaaaacatcttaaatatagtcttttccgtctaacttatagacaaaaacgagccccgaagggctcgttttatcatttactggacggcgacaatccggtcttcattaacttccaggcgaatcactttacccggaaccaattcaccagacagtatttgctgtgccagcgggttttcgatctgctgctgaattgcacgtttcagaggacgtgcaccatagaccggatcgtaaccgttctcgctcagcagtttcagcgcctcgtcagaaatgtggatttcataaccacgttcttccagacgtttgtacagacgtttcaactgaatctgcgcaatgctggcaatgtgctgttcacccagcggatggaagaccaccacttcatcgatacggttaatgaattccggacggaagttatggcttaccacaccgagcaccagctctttcatgtgcgcataatccagttcaccgaagcgttcctgaatcagatcggaaccgaggttagaggtcataatgacgaccgtattacggaagtcgaccgttctcccttgcccgtcagtcagacgcccatcatccagtacctgcaacagaatgttgaagacatccggatgcgctttttccacttcatccagcaggatgacggaatacggacgacgacgcaccgcttcggtcaggtagccaccttcttcataaccgacatatcccggaggcgcaccaaccaaacgagacacgctgtgtttctccataaactcggacatatcgatacggaccatcgcctcgtcgctatcaaacataaagttcgccagcgccttacaaagctctgttttccccacaccagttgggccgaggaacaggaaactaccaatcgggcgatttggatccgccagccccgcacggctacgacgaatagcgttagataccgcatcaaccgcttcgttctgaccaattacgcgatggtgcagttcttgctccatacgcagcagtttttcgcgctcgctttccatcatgcgagaaaccggaatccccgtccaacgcgccagcacttcagcaatttcggcgtcggtcactttattacgcaacagacgcatagttttgccttcgagctgcgttgcggcttccagttgcttttccagttccgggattttgccgtattgcagttcagacatccgcgccaggtcccccacacggcgagcctgttcaatagcgattttcgcctgttccagttccgctttaatggtctgcgtaccagaaaggcttgccttctctgctttccactcttcttctaactcggagtactgacgttctttgtcgctcagttcttcgttgagcatatccagacgttttttactggcttcatcagactctttcattaacgcctgttgttccagtttgagctggatgatacgacgatcgagtcggtcgagttcttctggtttactgtcaatctgcatacgaatgctggatgctgcttcatcgatcaggtcgatggctttatccggcagctgacggtcagcaatgtagcgatgagacaacgtcgccgctgcaacaattgccgggtcagtaatttgcacatggtggtgcaattcgtaacgttctttcaggccacgcagaatcgcaatggtatcttcaacagaaggctcggcaacaaacactttctggaaacgacgttccagcgcagcatctttttcaatgtactggcgatattcgtcaagcgtcgtggcacctacgcagtgcaattcaccacgcgccagcgccggtttcagcatgtttccggcgtccattgcgccatcggctttacccgcgccgaccatggtatgtaattcgtcgataaataggatgacgttgccttcctgtttggcaagatcgttaagcacgccttttaaacgttcttcaaactcaccgcgatatttcgccccagccaccagcgcgcccatatccagcgccagtacccggcggcctttcaacccttccggcacttcgccgttgataatacgctgcgccagaccttcaacgatggcagttttaccgacgccgggttcaccaatcagtaccgggttatttttagtacgacgttgcagcacctgaatggtacggcgaatttcttcatcacgaccaatcaccggatcgagtttgccctgttcggctcgttcggtaaggtcgatggtatattttttcaaagcctgacgttggtcttcagcaccttgatcgttcacgctttcacctccacgcatttgttcaatcgcttgagtaatgttggcggtggtcgcccctgctgctttcaggatgtcggccagcgtgccgcgagactcaagtgccgccagaacgaacagttcactgctgataaagttatcaccacgtttttgcgccagcttgtcgcaaagattaagaacgcgcaccagatcctgacttggctggacatcaccaccagtaccttcaacctgcggtaaacgatttaatgcctgattgatatctgtgcgcaactggccagcatttatgccagcggatgttaataaaggactaacgctacccccttcctgattcagcagggcgctcattaaatgaagtggttcgataaattggttgtcgtgcccgagtgcaagactttgggcatcggcaagagcaagctggaatttattagtaagacgatccagacgcataactcctcccataacggatcaaagttgctactggagattaaatgaggtcatccctcaattattcaaggttattgaccagattaatgtgaaaagaaaatcacgcgtaccggatcgtcttgattctttaggttatatcagccaaatgaaacttgccatacgaccggtggtcttgtcgcgacgataagagaagaaagtctcattttccgtatatgtacaacggtcgccgccgaaaatttgctcaacacccacgttcgccagacgctgccgggcaagctgataaatatccgccagatacttatcaccatgctgaatgaaagctgcacttgctttagcgtctactgccataaacgcctcgcgaacctccccccccacttcgaacgcgcgtggaccaattgccggccctaaccaggcgagaatattttccggattatcagcaaaacaggaaaccgtctcttccagcacgcctgcgcacagtccacgccagccagcatgagcggcggcgacttccgttcccgctcgattgcaaaacagcacagggaggcagtcggcagtcatcactgcgcaaaccgtgccgggcgtattgctataagaggcatccgcccgtttactggcataaggttcgccagtgagcttaagcacatctttgccgtgtacctgctcaagccagaccggtttagaaggcaaattgcccgcagcaaaaagtcgcttgcgattctcctcaacgtgatccgggttatcgccacaatgggcaccgaggttgagactgtcatacgggggcaagctcacgccgccgatacgagtggagctacaggccgcaacaccttttggctgcggccactgcgggacaatcagcttactcataaccagtccacttcatccttatgttcttcgaaatcggcgcgcatcacctcaatcagctccaccatatcttgtggaataggcgcatgccattccatttcgatgccggagatcgggtgataaagacgcagcatggttgcatgtagcgcctggcggtcaaacttacgcagcgtggagataaatgcttcgctagcaccttttggcggacgcggacggccaccataaaccggatcgcccaccagcggatgagtgatatgggccatatgcacgcggatctggtgcgtacgtccagtttccagacgcaaccgcagacgcgtgtgcacacggaagtgttccatgatgcgatagtgagtcaccgctggtttgcccatcggatgcaccgccatatgggtacgtttggtcgggtggcgactgattggctcgtccaccgtgccacctgcggtcatatgaccaatcgccaccgcttcatactcacgagtaatttcacgccgttgcaaagattcgactaaacgcgtctgagccggaacggtttttgccacaaccatcaggccagtggtgtctttatccagacgatggacgatgcccgcacgcggtacatcggcaatgggtggatagtaatgaagcaacgcattcagtaccgtgccatccgggttacccgcgccaggatgtaccaccaggtcgcgcggtttattaatgataataatgtcttcatcttcatagacgatatccagcgggatatcctgcggttcaaaacgcgcttcttcttcaatctcagcgttgatggcaacctgctcgccacccaatactttttctttcggcttatcacaaactttgccgttaaccagcactcgctggtcgaggatccattcttttattcggctacgactataatccgggaacatttcggccaaagcctgatctaagcgttgaccgagttggttttcggacaccgttgcagtgagctgtactcgttgtgccatatatactgcttcttcgtttatcgttggggttttacggctttgccgtttaatatagtgtgctattgtagctggtcttaaccgggagcaggaacagagaatctcccgtattacattttgaggaaagtcaaaacgtcatgacgcgcatgaaatatctggtggcagccgccacactaagcctgtttttggcgggttgcagcgggagtaaggaagaagtacctgataatccgccaaatgaaatttacgcgactgcacaacaaaagctgcaggacggtaactggagacaggcaataacgcaactggaagcgttagataatcgctatccgtttggtccgtatagccagcaggtgcagctggatctcatctacgcctactataaaaacgccgatttgccgttagcacaggctgccatcgatcgttttattcgccttaacccgacccatccgaatatcgattatgtcatgtacatgcgtggcctgaccaatatggcgctggatgacagtgcgctgcaagggttctttggcgtcgatcgtagcgatcgcgatcctcaacatgcacgagctgcgtttagtgacttttccaaactggtgcgcggctatccgaacagtcagtacaccaccgatgccaccaaacgtctggtattcctgaaagatcgtctggcgaaatatgaatactccgtggccgagtactatacagaacgtggcgcatgggttgccgtcgttaaccgcgtagaaggcatgttgcgcgactacccggatacccaggctacgcgtgatgcgctgccgctgatggaaaatgcataccgtcagatgcagatgaatgcgcaagctgaaaaagtagcgaaaatcatcgccgcaaacagcagcaatacataacagaaacctgaaacacaaaacggcagcccttgagctgccgtttttttattctgtcagttgtgaaactgaagcgatttagtcgctatcgatctcatcaaatatggctcgctttgagatattcctcaagtaaaaaaacatctcttcctgcgatttctcacaaaaaagattcgttgacaaaaagtgacaaaattatgagattttcatcacacattttgacatcaggaacggtatgctgaattcaccaagacgggaagacaagaggtaaaatttatgacaatgaacattaccagcaaacaaatggaaattactccggccatccgccaacatgtcgcagaccgtctcgccaaactggaaaaatggcaaacacatctgattaatccacatatcattctgtccaaagagccacaagggtttgttgctgacgccacaatcaatacacctaacggcgttctggttgccagtggtaaacatgaagatatgtacaccgcaattaacgaattgatcaacaagctggaacggcagctcaataaactgcagcacaaaggcgaagcacgtcgtgccgcaacaagcgtgaaagacgccaacttcgtcgaagaagttgaagaagagtaatcctttatattgagtgtatcgccaacgcgccttcgggcgcgttttttgttgacagcgtgaaaacagtacgggtactgtactaaagtcacttaaggaaacaaacatgaaacacataccgtttttcttcgcattcttttttaccttcccctgaatgggaggcgtttcgtcgtgtgaaacagaatgcgaagacgaacaataaggcctcccaaatcggggggccttttttattgataacaaaaaggcaacactatgacaagcgaaaacccgttactggcgctgcgagagaaaatcagcgcgctggatgaaaaattattagcgttactggcagaacggcgcgaactggccgtcgaggtgggaaaagccaaactgctcagccatcgcccggtacgtgatattgatcgtgaacgcgatttgctggaaagattaattacgctcggtaaagcgcaccatctggacgcccattacattactcgcctgttccagctcatcattgaagattccgtattaactcagcaggctttgctccaacaacatctcaataaaattaatccgcacagtgcacgcatcgcttttctcggccccaaaggttcttattcccatcttgcggcgcgccagtatgctgcccgtcactttgagcaattcattgaaagtggctgcgccaaatttgccgatatttttaatcaggtggaaaccggccaggccgactatgccgtcgtaccgattgaaaataccagctccggtgccataaacgacgtttacgatctgctgcaacataccagcttgagcattgttggcgagatgacgttaactatcgaccattgtttgttggtctccggcactactgatttatccaccatcaatacggtctacagccatccgcagccattccagcaatgcagcaaattccttaatcgttatccgcactggaagattgaatataccgaaagtacgtctgcggcaatggaaaaggttgcacaggcaaaaagtccgcatgttgctgcgttgggaagcgaagctggcggcactttgtacggtttgcaggtactggagcgtattgaagcaaatcagcgacaaaacttcacccgatttgtggtgttggcgcgtaaagccattaacgtgtctgatcaggttccggcgaaaaccacgttgttaatggcgaccgggcaacaagccggtgcgctggttgaagcgttgctggtactgcgcaaccacaatctgattatgacccgtctggaaagtcgcccgattcacggtaatccatgggaagagatgttctatctggatattcaggccaatcttgaaagtgcggaaatgcaaaaagcattgaaagagttaggggaaatcacccgtagtatgaaggtattgggctgttacccaagtgagaacgtagtgcctgttgatccaacctgatgaaaaggtgccggatgatgtgaatcatccggcactggattattactggcgattgtcattcgcctgacgcaataacacgcggctttcactctgaaaacgctgtgcgtaatcgccgaaccagtgctccaccttgcggaaactgtcaataaacgcctgcttatcgccctgctccagcaactcaatcgcctcgccgaaacgcttatagtaacgtttgattaacgccagattacgctcactgctcataatgatgtcggcataaagctgcggatcctgagcaaacagtcgcccgaccatcgccagctcaaggcggtaaatcgggctagagagcgccagaagttgctcaagctgaacattttcttctgccaggtgcagcccgtaagcaaaagtagcaaagtggcgcagtgcctgaataaacgccatattctgatcgtgctcgacggcgctaatacgatgcagccgagcgccccagacctgaatttgctccagaaaccattggtatgcttccggtttacgtccatcacaccagaccacaacttgctttgccaggctaccgctgtccggaccgaacatcgggtgtagccccagcaccggaccatcatgcgccaccagcatggcctgtaatggcccatttttcacacttgccagatcgaccagaatacaatctttcggtaaaggcggtaatttgccaataacttgctcagtaacgtggattggcacactaacaatcaccattccggcatcggcaacaatatcagccgctcgatcccagtcatgttgctccagaatccgcacctgataaccgctgagggtcagcatcttctcgaacaggcgtcccatctgaccgccaccgccgacgataaccaccggacgcagactcggacaaagtgttttaaatcctttgtcgttttcactggagtaagattcacgcatcacccgacgcaaaacatcctcaatcagatctggcggtacacccagagcttccgcctctgcacgacggctggccaacatagatgcctcgcgctccggaacataaataggcagtccaaagcggcttttcacctcgcccacttcagcaaccagttccagacgcttcgctaataaattcagcagcgctttatcgacttcatcaatttgatcgcgtaatgcggtcaattcagcaaccataataaacctcttaagccacgcgagccgtcagctgcccgttcagatcctgatgaatttcacgcagcaaggcatcggtcatttcccagctaatgcaggcatcggttacggatacaccgtatttcatttcactgcgcggttgctcggaagactgattgccctcgtggatattactttcgatcatcagaccaataatactgcgattgccatctttgatttgagcaaccacggattctgccaccgcaggctgacggcgataatctttattggaattaccgtggctgcaatctaccatcagagacgggcgcagtcccgcctgttccatctctttttcacattgcgcaacatccgcagggctatagttcggcgctttaccaccgcgcaggatcacatggccgtccggattcccctgagtttgtagcaacgcaacctgccctgcctggttaatgccaacaaaacggtgcggctgggcggcggcgcgcatagcgttaattgctgttgccagactgccgtcggtgccgtttttaaaaccaaccggcatggaaagcccggaggccatttcacggtgagtttggctttccgttgtacgagcaccaattgcactccagctaaacagatcgcccaggtattgcgggctattcggatctaacgcttccgtcgccagtggcagtcccatattcaccagctcaagcagcaatttacgcgcgatctgcagcccggcttctacatcaaaagagccatccatatggggatcgttaattaaccctttccagccgacagtggtacggggtttttcaaaatagacgcgcattaccagatagaggctatcgctgacctctgcggcaagggctttaaatcgacgagcatattccagagcagtttccggatcatgaatggaacaaggaccacatactaccagcagacgaggatcgcgcccggcgataatatcactaatgcttttacggctgtcagcaatctgggcttcttgttgcaggctcaatggaaaagcggccttcagttgttccggagtcattaaaacctgttcgtcggtaatatgtacgttattcagcgcgtctttttgcatgatggcgatcctgtttatgctcgtttgcgatagttgatcctcagcgaggatgacgtaacgataacacataaagtaaagttttcaatccatatttcgtacatttttatttacacaggcaatttagtcgcgctttcaacccttacctctgtatagataaatttacactccctttgaaaacaatccgctatgctttgaaaaaggagaaagaaatgatgaaaaagtttatcgcccccttgttggctttactggttagcggatgtcagattgatccttatactcacgcgccaaccttgaccagcaccgactggtatgatgtcggtatggaagatgcgataagcggcagcgccataaaagatgacgatgcatttagcgatagtcaggcggatcgcggtctataccttaaaggatatgccgaaggacaaaagaaaacttgccagaccgattttacttatgcccgaggactttccggtaaaagctttcctgccagctgcaacaatgttgaaaatgccagccaactgcatgaagtaggcaaaaaggggctgatgaaaatgccagcacaatacgattaaattaattaaaaccccacaaataaattaaacataagattttactcattgtgttttatttctcacattgatgacggtcgcatgaaaaaatgatattttaatgagcattctgaaaaaatatcgatgcatttcgagcgaagatggtggggatccctgaatgcgtttttctcaccgactgttcttacttctgattctcctgctgacgggagcaccaatactcgctcaggagccttctgacgttgcgaaaaacgtgcgtatgatggtttccggtattgtcagttacacccgctggcctgcgctaagtgggccaccaaagttatgtatctttagttctagtcgttttagtaccgccctacaagagaatgccgcgacatctttgccttatctgcctgtcatcattcacactcaacaagaggcgatgattagtggctgcaatggtttttattttggcaacgagagtccgacattccagatggaattaaccgaacaatatccgagtaaggcgttattattaattgccgaacaaaataccgagtgcattattggtagcgccttttgtctgatcatccacaataatgacgtcagatttgccgtaaacctggatgccttaagccgtagcggtgtaaaggtcaacccggatgtcttaatgctcgcacggaagaaaaatgatggataacgataattctcttaataagcgccccacgtttaaaagagcattacgcaacatcagtatgaccagcatatttatcactatgatgctgatctggttgctgctttccgtgaccagcgtgctgaccctgaaacagtacgcgcaaaaaaacctggcactgacagcagcaacaatgacttacagtctggaagcagctgtcgtttttgccgatggccctgcagcaactgaaacactggcagcgctgggccagcaagggcaatttagtactgcagaagtacgtgataagcagcaaaatattctggcatcctggcattacacccgtaaggatccaggcgatactttcagtaatttcataagccactggctcttccctgcccccatcattcagccgattcgtcacaatggtgaaaccattggcgaagtacgcttaaccgctcgcgacagtagtatcagccattttatctggtttagcctcgccgtactgaccggttgtattctgctggcaagtggcatcgcaattaccctcacccgccatttgcacaatggcctggtagaagcgctgaaaaatatcaccgatgtcgtacatgatgtgcgttccaaccgcaatttttcccgacgagttagcgaagaacgtatcgctgagtttcaccgcttcgctctcgacttcaacagtctgctggatgaaatggaagagtggcagcttcgtttacaggctaaaaatgcgcagcttctacgtaccgcgctacatgacccattaaccgggctggctaaccgcgcagcgtttcgtagcggcatcaacacgttgatgaacaattccgatgcccgaaaaacgagcgcgttactatttcttgatggcgataatttcaaatacatcaatgatacctggggtcatgcgacgggcgatagagtcttgattgaaatcgcaaaacggttagctgaatttggcgggctgcgacataaagcataccgcctgggcggcgatgaattcgctatggtgctctatgatgtacagagcgaatctgaagtgcagcagatatgtagtgcactgacacaaatctttaatctcccgtttgatcttcataatggccatcagaccaccatgacattaagcattggttacgcgatgaccattgagcacgcctctgcggaaaaattacaagagcttgccgatcacaatatgtatcaggccaaacaccagcgtgccgaaaagctggtgagataacaaggatatatcgatatgataaagcacctggtagcacccctggttttcaccagtctaatactgactggctgccagtcccctcagggaaagtttactcctgagcaagtcgccgctatgcaatcttatggatttactgaatccgccggcgactggagcctgggcttaagtgatgccattctgttcgcaaaaaatgactacaaattgctcccggaaagccagcaacagatccaaaccatggcagctaaattggccagcacagggctaacacatgcccgtatggatggacacaccgataactatggtgaagacagttacaacgaaggcttaagtttgaaacgggcgaatgtcgtggccgatgcatgggctatgggtggacaaattccacgcagcaatctcaccacacagggtttaggaaaaaaatatcccatagccagtaacaagaccgcccagggccgcgccgagaaccgccgcgtcgcagtggtgattactaccccttaaaacaccagcaaacagataaaaaagggccagccaattggccagcccttcttaacaggatgtcgcttaagcgaaatcttagttaagacgctctttgatacgagcagccttaccagtacgctcacgcaggtagtacagtttagctttacgaacagcaccacgacgtttgacagaaatgctgtcaactaccggagagtgagtctggaagacacgctcaacgccttcgccgttggaaattttacgaacagtgaatgcagagtgcagaccgcggttacgaatagcgataaccacgccctcgaatgcctgcagacgttttttggaaccttcaacaacccatactttcacttccacggtatcacccggacggaaggaaggtacgtcctgcttcatctgctcttgttcaagttgcttaataatgttgctcataatttaatctcttatcctgggtaaactgatatctcgggggcttacgccatcccatcatgtttatgttgctgttgtgcgtgttccgttttgaactccgccagcaaccttgcttgctcttcagtcagagccaggttttccagaagttcaggtcttctaagccaggtacggcccaggctctgtttcaaacgccagcgacgtatctcggcatggttgccgctcagtaacactggcggaacttccatcccttctaacacctcaggccgcgtatagtgcgggcaatccagcaatccttcagcaaaggaatcttccgttgcgctggcttcatgtcccagtactcccggaataaaccgggaaacggagtcaatcagcgtcattgctggtaactcaccaccactgagaacgtaatcgccgatactccattcttcgtcaatttcggtttggatcacgcgctcatctataccttcgtagcgaccgcacaccagaatcaatttttgattcgttgccagttcgctgacgcccgcttgatcaagcttgcgtccctgtggactcagataaatcacctttgcgccttcacccgccgcggcttttgctgcatgaatggcgtcccgcaagggttgcaccatcattaacatccccggtccgccgccgtaaggacgatcgtccacggtacggtgccggtcatgcgtgaagtcgcgaggactccagctctggatgctcagcaggccatttttaactgcccggccagttaccccgtaatcggtaattgcgcggaacatttcaggaaacaggctaattatgccaatccacatagcgccgtcttttaccgtttatccggtggtttaaaaaccaggatcccaatctacttcgatactacgagtagtgagatcgactttcttgataacctgcccatcgaggaacggtacgagacgttccttgataccaaacgcatctttcaggtttgccttaatgacgagaacgtcattagatccggtttccatcatatcgacgactttaccgagatcgtagccttcagtggttactacctggcagcccatcaggtctttccagtagtagtccccctcttcaagctgaggcagctggctactatccacgacaatttcacaattcgtcagcaggttcgccgcatcacgatcgtcaacgcctttcagcttgatgatcatgtcctgattgtggtgcttccagctttccagctggacttgctgccactgacccgccttctggataaaccagggctgatagtcaaaaatgctttcggcgtcttcggtggaagaaaacactctgagccacccacgaataccgtaagagctacccatttttcccaaaacgatgggatcaacaggtgcttgcgcggtgagttgtttgctcatcatgaccaccgtgacagattaagctgctttgtttacttctttgatcagcgcagcaacgcgatcagaaatagttgcgccctggccaacccagtgagcgatgcgatccagatccaggcgagtgccttcttctttttcgctagcgattgggttgaagaaaccaacgcgctcgatgaagcgaccgttgcgtgcattacggctgtcagcgacaacaacctggtagaacggacgctttttagcgccgtgacgtgctaaacgaatagttaccataacatcctcttgtgtgaataaaacaaccggaccccatcgaggaacggagtccggtgtcatattaaaagcccgaaaattttactcatttttgcgggaattgcaatcaacagttgctaactctgctgtaaaaggccgtcggcggtgcagccagtttggtgccggagtgcgcgcagtcaccggagcgtacacgcagtacgtgaggatgacgagcacatcccggtgccaaaatggcaaacaagccaggccgattagcgaccagggaagcctgggggcatcatacccttcatgcttctcatcatcttcgccattccgcccttcttcattttcttcatcatgcgctgcatgtcgtcgaactgtttcagaagacggttaacgtcctgcacctgcataccgcaaccggcagcaatacggcgtttacggctacctttgatgatttctggcttagcgcgctctttcatcgtcatgctgttgatgatggcttccatacgcaccagcactttatcgtccatctgactcttgacgttatccgggatctgccccatgcccggcagcttgcccatcagactagccatgccgcccatatttttcatctggcgcagctgctcaagaaagtcgttgagatcgaagccgtcaccttttttcagcttgctggctaatttctctgcctgcgcgcggtcaactttgctttcgatatcttcgatcaggctcagtacgtcgcccatgccgagaatacggctcgcgatgcggtccggatggaacggctccagcgcctcagttttctcgccaacaccgaggaacttgatcggtttgccagtgatgtgacgaatagagagcgccgcaccgccgcgggcatcgccgtccactttggtcaacactacgccggtaagcggtaacgcttcattgaatgcttttgccgtattggccgcatcctgaccggtcatggcgtcaaccacaaacagggtttcaaccgggttaatgctcgcatggacttgtttgatctcgtccatcatcgcttcgtcaacgtgcagacgaccagcggtatccaccagcagcacgtcgtagaatttcagtttggcttctttcagcgccgcgttaacgatatctaccggcttctgaccaacatcagaagggaagaaatcaacgcccacctgctctgccagcgtctcaagctgtttgattgccgccgggcgataaacgtcggcagaaaccaccagcactttcttcttgtgcttctcgcgcaggaacttaccgagtttaccaacgctggttgttttaccggcaccttgcaggcccgccatcagtacgaccgcaggcggttgcgcagccaggttcagggtctggttctcttcgcccatcgccgcaaccagttcgttacggactattttgacgaactcctgccccggcgtcaggctcttattaacttcatgaccaaccgctttctcttttacgcgattgataaactcacgcactaccggcagagctacgtccgcctccagcagcgccatgcgcacttcgcgcagcgtatcttttacgttgtcttcagtgaggcgtccacggccactgatattgcgcagcgtgcggctcaaacgatcggttaaattatcaaacattgtctctcgcctggggtggaaacggttggccgcaatcgcgacacatcatcagtattttgccgcagtataacatgaaggcgtctttgttgttatgcaacggttggagcagcgtagtcctgacgctatactgcttctctttcttattgctcaaactgtcgacatcactatgcccgtttttgctctgctcgcgcttgtcgcctactccgtcagtcttgcgctgattgttcccggtctgctgcaaaaaaacggcggctggcggcgcatggctattatttctgcggtcattgcgctggtctgccacgcaatcgctctggaagcccgcatcctgcccgacggtgatagcggacaaaacctcagcctgctgaacgttggtagtttggtcagtttgatgatctgtacggtaatgaccattgtggcttctcgcaatcgtggctggctgctgctacccattgtctatgcctttgcgcttatcaacctggcgctggcaaccttcatgcccaatgaatacatcacccatctggaagctacgcctgggatgctggtgcacattggcttaagcctcttttcctatgccacgctaattatcgccgccctgtacgcgctgcaactggcgtggattgattaccaactgaagaacaagaagctggcgtttaaccaggaaatgccgccattgatgagtatcgagcgtaaaatgttccacatcacgcagattggcgtggtgctgctaacgctcacgctttgcactggcctgttctacatgcacaacttatttagcatggaaaatatcgacaaggctgtgctctctatcgtggcgtggtttgtctatattgtgctgctgtggggacattatcatgaaggatggcgtggacgccgcgtcgtctggtttaacgttgcgggcgcggtaattctgacactggcctacttcggcagccgaattgtccagcagttaatcagctaaacccagaaaaggagtttcccctggaacacatttctactactacgttgatcattattctgatcatcatggtggtcatttcagcctatttttccgggtccgaaaccggaatgatgaccctcaaccgctatcgtctgcgacatatggcgaaacagggtaatcgcagcgccaaacgcgtcgaaaaattgctgcgtaagccagaccgcctgataagcctggtgttaatcggcaataacctggtcaatattcttgcctccgcgctcggcactattgttgggatgcgtttgtacggcgatgcgggcgtggcaattgcgactggtgtgctgacttttgtcgtactggtatttgctgaggtattgccgaaaaccattgccgcgctgtacccggaaaaagtcgcttatccgagtagttttctgctggctccgctgcaaattttgatgatgccgctggtctggttgctgaatgctatcacccgtatgctgatgcgcatgatgggtatcaaaaccgatatcgtggttagcggctctttgagcaaagaagagttgcgcactatcgtgcacgaaagtcgcagtcaaatttcccgtcgcaatcaggatatgctgctgagcgtgctcgatctggaaaaaatgaccgttgatgacatcatggtgccgcgcagtgaaattatcggtattgatatcaacgatgactggaaaagcattctgcgccaactctcccacagtcctcacgggcgcatcgtgctctaccgtgatagcctggacgacgccatcagtatgctgcgagtacgtgaagcctggcggttgatgagcgagaaaaaagagttcaccaaagaaaccatgctgcgcgccgcggacgagatctattttgtgccggaaggtacgccgctcagcacgcagttggtaaagtttcagcgcaacaaaaagaaagtcggcctggtcgtcaacgagtatggagacattcaggggctggtgacggttgaagatattctggaagagattgtcggcgatttcactacgagcatgagcccaacacttgccgaagaggtcacgccgcaaaacgacggtagcgtgattatcgatggcaccgccaacgtgcgggaaatcaacaaagcctttaactggcatctaccggaagatgatgcccgcacggttaatggcgtcattcttgaggcactggaagagatccctgtcgcaggcacccgcgtgcgtattggcgagtacgatatcgatattctcgacgtacaggacaatatgattaagcaggtaaaagtttttcctgtgaaaccgctgcgcgagagtgtggcggagtaacgaaaacggcccggcattcgcatgcagggccgtgaattattacgaaagcagaaattaagcttttgctttcgctacagtaaccatcgccgcacgaatcgtacgaccattcagcgtataacccttctgcataatgcccagtacgttacctggcgcaacgtcatcagattccaccattgcgatggcctgatgcacattcgggtccagtgggacgttagtttcggcgatcacttcaacgccaaacttacgcacaacatccagcatgctcttcagcgtcagctcaatgccttcaaccatcgcagacatatccgggttagctttatcagccacttccagcgcacgatccaggctatcaatcaccggcagcaattcgttgatgaatttctccagcgcgaatttgtgggctttttcaatatccagttcagtacgacgacgcaggttttccatttcggcttttacacgcaaaatgccgtcacgttcacgggtctgggcttcagccagctgagcttcgagattcgcaactttttcatcgcgcggatccacctgctcagcagaagcttctggctcaactgcctcaatctcttcgtgctgatccatgataatttcttccggggcttgcccctcaggcgttttctgttctttactactcatgaatttctccgcgtttttttcgcattcatctcgctaacttcgcttattatggggatcagtttcagggtttcaagggaagcactcacattgtcatcaatcttcgcaacaaggacctcggaaaaatgaataatcatttcaagtgtattggcattgtgggacacccacggcaccccactgcactgacaacacatgaaatgctctaccgctggctgtgcacaaaaggttacgaggtcatcgttgagcaacaaatcgctcacgaactgcaactgaagaatgtgaaaactggcacgctcgcggagattgggcaactagctgatctcgcggtagtcgttggtggcgacggtaatatgctgggcgcggcacgcacactcgcccgttacgatattaaagttattggaatcaaccgtggcaacctgggtttcctgactgaccttgaccccgataacgcccagcaacagttagccgatgtgctggaaggccactacatcagcgagaaacgttttttgctggaagcgcaagtctgtcagcaagattgccagaaacgcatcagcaccgcgataaatgaagtggtgcttcatccaggcaaagtggcgcatatgattgagttcgaagtgtatatcgacgagatctttgcgttttctcagcgatctgatggactaattattagcacgccaacaggctccaccgcctattccctctctgcaggcggtcctattctgaccccctctctggatgcgattaccctggtgcccatgttcccgcatacgttgagtgcacgaccactggtcataaacagcagcagcacgatccgtctgcgttttagccatcgccgtaacgacctggaaatcagttgcgacagccagatagcactgccgattcaggaaggtgaagatgtcctgattcgtcgctgtgattaccatctgaatctgattcatccgaaagattacagttatttcaacacattaagcaccaagctcggctggagtaaaaaattattctaattttacgccagcctctttactgtatataaaaccagtttatactgtacacaataacagtaatggtttttcatacaggaaaacgactatgttggcacaactgaccatcagcaactttgctatcgttcgtgagcttgagattgattttcatagcggcatgaccgtaataactggcgagaccggcgcgggtaaatctattgcaatagatgccctcggtctttgtctcggtggtcgcgctgaagccgacatggtgcgtaccggcgctgctcgcgctgacctgtgcgcccgtttttctctgaaagatacgccagcggctctgcgctggctggaagaaaaccagcttgaagacgggcatgaatgtttgcttcgtcgcgtgatcagcagcgatggtcgctcccgtggtttcatcaacggtacagctgttcctctgagtcaactgcgcgaactgggtcagttgctgattcagatccatggtcagcacgctcatcaattactcaccaaacctgagcaccaaaaattcctgcttgatggctatgccaatgaaacctctctactgcaggaaatgaccgcacgttatcagttgtggcatcaaagctgccgtgacctcgcgcatcatcaacagttaagtcaggaacgcgccgcccgtgcggaactgctgcaataccaattaaaagaacttaacgaatttaatccgcagcccggagagtttgaacaaatcgacgaagagtacaaacgtctggcgaacagcggtcaattgctgaccaccagccagaatgcattggcattaatggccgacggtgaagacgcaaacctgcaaagtcagctttacacggctaaacaactggtgagcgaattgattggcatggacagcaaactgtccggcgtacttgatatgctggaagaagctaccatccagattgctgaagccagcgatgaactgcgccactactgcgatcgtctggatctcgatcccaaccgactatttgaacttgaacagcgcatcagtaaacagattagcctggcacgtaaacatcacgtcagccctgaggcattgccacagtattaccagagcctactggaagaacagcagcaactggacgatcaggccgacagtcaagaaacgcttgcgctggcggtaacgaaacatcatcagcaggcactggaaatcgcgcgcgcattacaccaacaacgccagcaatatgcagaagaacttgcacagctgatcaccgacagtatgcatgcgctcagtatgccgcatgggcagtttacgatcgatgttaaatttgacgagcatcacctgggcgctgacggtgccgatcgtattgagtttcgggtaaccaccaacccaggtcagccaatgcagcctattgccaaagtcgcatccggtggtgaattgtcccgcatcgcactggcaatccaggtcatcacggcgcgtaaaatggaaaccccggcactgatttttgatgaagtggatgtagggattagcggtccaacagcggcagttgtcggcaaactgctgcgtcaactcggcgaaagtactcaggtgatgtgtgttacccacctgccacaagtcgcgggatgtggtcatcaacactattttgtcagcaaagaaaccgatggtgcgatgacagaaacgcatatgcaatccctgaataaaaaagcgcggttacaagagctggcgcgcctgcttggtggcagtgaagtcacacgtaatacactggcgaatgcgaaagaactgcttgcagcgtaaacttttttcctgcttcacggtcagagtaaacagcaaaacgccgtaagaccggaaagcaaaaggttttaaagtgatgaaaggtctattatcatcggcatattacagatgagccacgtactgctcgggcccgaaaaggaatcaaatcactatgcgctgtaaaacgctgactgctgcagcagcagtactattgatgttgaccgcaggctgttccactctggagcgagtggtttaccgtcctgacatcaaccaggggaactatctgaccgctaacgacgtatccaaaatacgtgttggcatgacgcaacaacaagttgcgtacgcattgggtacaccgctgatgtccgatccatttggtacgaatacctggttctatgtcttccgccagcaaccaggtcatgaaggtgtaactcagcaaacgctgacgctgacctttaacagtagcggtgtgttgaccaatattgataacaaacctgcgctgagtggtaactaataataaagttgctctcaaagacgttaaaaaaggtgctcaatgagcaccttttttctgtctgttatttattcgcacttttttctgctcgttgcctgcgaagctctttcggatcggcaatgagagggcgataaatctccacccgatcgccatcatgcacactatcgcttagttttgccggacggctgtaaatgccgactttgtttttagttaaatcgatatcggtacgcaattccagcaagccactggcgcgaatagcttcttcaaccgtcgcgccctcctgcagcgtcactcgctgcaggtactgcttctcaggtagcgcataagccacctcaacggcaattttacctggcactgtaaacctctttcgcacgaaccgtaaaagcctggaccatattagccgccagctctttaaacacgcgaccaaaggcgagttcaatcaacttattggtaaactcaaagtcgagatgaaactcgatacgacacgcctcctggctcagcggcgtaaacttccatccaccaatcaatttcttgaacggcccatccaccagattcataagaatactttggttactggtcaactggttgcgggtagtaaacgttttgctgatcccagccttagagacatctaccgccgcagtcatctgcccaggagtggactccagaatccgacttccggtacaacccggcaaaaactgaggataagactgaacgtcattcactaactgatacatttgctccgcgctgtagggtaccagtgcggtccggctaatctgaggcataacaatttccatcaacaaaaatccaacaaataatatcatttatcctgctgtaaaaaaaacgctatcccggcgctgggtaacatcgggttcatgctaagatagagccttgtcccccgcaggattgatatggggtgttttcgatttcagattaccgatgattcacgacgcttatgacgaagaaaaaagcacataaacctggtagtgcgaccatcgcgcttaacaagcgcgcccgtcacgaatactttatcgaagaagagttcgaagcgggacttgccctgcaaggctgggaagttaaatccctgcgcgcaggaaaagccaatatcagcgacagctacgtccttctgcgtgacggagaggcatttctgtttggcgctaacatcacgccaatggccgtggcctccacgcatgtggtgtgcgatcctacccgtacccgcaagttacttctcaaccagcgcgaactggacagtttgtacggtcgcgtcaatcgagaaggctataccgtagtggcgctctccctgtactggaaaaatgcctggtgcaaagtgaaaatcggcgtcgccaaaggtaagaaacagcacgataaacgtagtgatatcaaagagcgcgaatggcaggtggataaagcacgtatcatgaaaaacgcccaccgttaaacctgcactccaattattgaccagttcctcaccgcgcctccctctccggcggcgcgaatgaacatcttattggctatcacatccgacacaaatgttgccatcccattgcttaatcgaataaaaatcaggctacatgggtgctaaatctttaacgataacgccattgaggctggtcatggcgctcataaatctggtatacttacctttacacattggggctgattctggattcgacgggatttgcgaaacccaaggtgcatgccgaggggcggttggcctcgtaaaaagccgcaaaaaatagtcgcaaacgacgaaaactacgctttagcagcttaataacctgcttagagccctctctccctagcctccgctcttaggacggggatcaagagaggtcaaacccaaaagagatcgcgtggaagccctgcctggggttgaagcgttaaaacttaatcaggctagtttgttagtggcgtgtccgtccgcagctggcaagcgaatgtaaagactgactaagcatgtagtaccgaggatgtaggaatttcggacgcgggttcaactcccgccagctccaccaaaattctccatcggtgattaccagagtcatccgatgaagtcctaagagcccgcacggcgcaagccctgcgggcttttttgtgccctcaatttgtcccgcgaagtccgaagagaactaattaaatccgaaccttttaggcccattgataggcccaacgaaaagctctattgtttacgttgggctaaacgcagggagactccccacctttgaaaacaggatgtagcgatgaaacttaacgacagtaacttattccgccagcaggcgttgattaacggggaatggctggacgccaacaatggtgaagccatcgacgtcaccaatccggcgaacggcgacaagctgggtagcgtgccgaaaatgggcgcggatgaaacccgcgccgctatcgacgccgccaaccgcgccctgcccgcctggcgcgcgctcaccgccaaagaacgcgccaccattctgcgcaactggttcaatttgatgatggagcatcaggacgatttagcgcgcctgatgaccctcgaacagggtaaaccactggccgaagcgaaaggcgaaatcagctacgccgcctcctttattgagtggtttgccgaagaaggcaaacgcatttatggcgacaccattcctggtcatcaggccgataaacgcctgattgttatcaagcagccgattggcgtcaccgcggctatcacgccgtggaacttcccggcggcgatgattacccgcaaagccggtccggcgctggcagcaggctgcaccatggtgctgaagcccgccagtcagacgccgttctctgcgctggcgctggcggagctggcgatccgcgcgggcgttccggctggggtatttaacgtggtcaccggtagcgcgggcgcggtcggtaacgaactgaccagtaacccgctggtgcgcaaactgagctttaccggtagcaccgaaattggccgccagttaatggaacagtgcgcgaaagacatcaagaaagtgagcctggagctgggcggtaacgcgccgtttatcgtctttgacgatgccgacctcgacaaagccgtggaaggcgcgctggccagcaaattccgcaacgccgggcaaacctgcgtctgcgccaaccgcctgtatgtgcaggacggcgtgtatgaccgttttgccgaaaaattgcagcaggcagtgagcaaactgcacatcggcgacgggctggataacggcgtcaccatcgggccgctgatcgatgaaaaagcggtagcaaaagtggaagagcatattgccgatgcgctggagaaaggcgcgcgcgtggtttgcggcggtaaagcgcacgaacgcggcggcaacttcttccagccgaccattctggtggacgttccggccaacgccaaagtgagcaaagaagagacgttcggccccctcgccccgctgttccgctttaaagatgaagctgatgtgattgcgcaagccaatgacaccgagtttggccttgccgcctatttctacgcccgtgatttaagccgcgtcttccgcgtgggcgaagcgctggagtacggcatcgtcggcatcaataccggcattatttccaatgaagtggccccgttcggcggcatcaaagccagcggtctgggtcgtgaaggtagcaagtatggcatcgaagattacttagaaatcaaatatatgtgcatcggtctttaactggagaatgcgaatgaacagcaataaagagttaatgcagcgccgcagtcaggcgattccccgtggcgttgggcaaattcacccgattttcgctgaccgcgcggaaaactgccgggtgtgggacgttgaaggccgtgagtatcttgatttcgcgggcgggattgcggtgctcaataccgggcacctgcatccgaaggtggtggccgcggtggaagcgcagttgaaaaaactgagccacacctgcttccaggtgctggcttacgagccgtatctggagctgtgcgagattatgaatcagaaggtgccgggcgatttcgccaagaaaacgctgctggttacgaccggttccgaagcggtggaaaacgcggtaaaaatcgcccgcgccgccaccaaacgtagcggcaccatcgcttttagcggcgcgtatcacgggcgcacgcattacacgctggcgctgaccggcaaggtgaatccgtactctgcgggcatggggctgatgccgggtcatgtttatcgcgcgctttatccttgcccgctgcacggcataagcgaggatgacgctatcgccagcatccaccggatcttcaaaaatgatgccgcgccggaagatatcgccgccatcgtgattgagccggttcagggcgaaggcggtttctacgccagcagcccagcctttatgcagcgtttacgcgctctgtgtgacgagcacgggatcatgctgattgccgatgaagtgcagagcggcgcggggcgtaccggcacgctgtttgcgatggagcagatgggcgttgcgccggatcttaccacctttgcgaaaagcatcgcgggcggcttcccgctggcgggcgtcaccgggcgcgcggaagtaatggatgccgtcgctccaggcggtctgggcggcacctatgcgggtaacccgattgcctgcgtggctgcgctggaagtgttgaaggtgtttgagcaggaaaatctgctgcaaaaagccaacgatctggggcagaagttgaaagacggattgctggcgatagccgaaaaacacccggagatcggcgacgtacgcgggctgggggcgatgatcgccattgagctgtttgaagacggcgatcacaacaagccggacgccaaactcaccgccgagatcgtggctcgcgcccgcgataaaggcctgattcttctctcctgcggcccgtattacaacgtgctgcgcatccttgtaccgctcaccattgaagacgctcagatccgtcagggtctggagatcatcagccagtgttttgatgaggcgaagcagtaacgccgctcctatgccggaggcgacgctgcgcgtcttgtccggcctacggggatccaggtcggataaggcgtttacgccgcatccgacaatctgtacgtgaacaggaagaaatctatgttggccgggtaaggcggagccgctctccggcaaaaagaatcaataacaattatacgcgtgacccggcgcgggaaatgtcggggcgctctcccaagtgacacactttcgagaggattcaggatggggcaaagtagccaaccacatgagttaggcggcgggctgaagagtcgccacgtcaccatgttgtctattgccggtgttatcggcgcaagtctgtttgtcggttccagcgtcgccatcgccgaagcgggcccggcggtattactggcctatctgttcgccgggctactggtggttatgattatgcggatgttggcggaaatggcggttgccacgcccgataccggtagcttttccacctatgccgataaagccattggtcgctgggcgggctataccatcggctggttgtactggtggttttgggtactggttatcccgctggaagccaacatcgccgccatgatcctgcacagttgggttccaggcattcccatctggttattttccctcgtcattaccctcgccttaactggcagtaacttattaagcgttaaaaactacggcgaatttgagttctggctggcgctgtgcaaagtcatcgctatcctggcctttattttccttggtgcagtcgcaattagcggtttttacccgtatgccgaagtgagcgggatcagtagattgtgggatagcggcggctttatgcccaacggtttcggtgcggtattaagcgcgatgttgatcaccatgttcagctttatgggcgcagaaattgtcaccattgccgccgcggaatccgacacgccggaaaaacatattgtccgcgccaccaacagcgttatctggcgtatttctatcttctatttatgttctatttttgtcgtcgtggcattaattccgtggaatatgcccggactaaaagccgtcggttcttatcgcagcgtactggaattgctcaatattccccatgcgaaattaatcatggactgcgtgatattactttccgtaaccagttgcctgaacagcgcgctgtataccgcgagtaggatgctctactccttaagtcgtcgcggtgatgctcccgcggtaatgggtaaaatcaaccgcagtaaaaccccgtacgtggcggtgttactctccaccggcgcggcattcttaacggtggtggtgaactattacgcgcctgcgaaggtatttaaatttctgatcgacagctccggcgctatcgccctgctggtttatttagtcatcgccgttagtcagttgcggatgcgcaaaattctgcgagcagaaggaagcgaaattcgcttgcgaatgtggctttatccgtggctcacctggctagtcatcggctttattacctttgtgttggtagtgatgctattccgtccggcgcaacagttagaagtgatctccaccggcttattagcgatagggattatctgtaccgtgccaattatggctcgctggaaaaagctggtattgtggcaaaaaacacccgttcataatacgcgctgatcatgatcaggagtcacaccatgaccattacgtctctggatggctatcgctggctgaagaacgatattattcgcggtaattttcaaccggatgaaaaattacgaatgagtttgctgacaagccgttatgcacttggcgttgggccgttacgggaagctcttagccaactggtggcggaacggctggtcacggtggtgaatcaaaaagggtatcgggtggcgtctatgagtgagcaggagctgctcgatattttcgacgcccgcgccaatatggaagcgatgttagtgagtctggcgattgcccgcggtggcgatgagtgggaggcagacgttctcgcaaaagcgcatctgctgagtaagcttgaggcctgtgacgccagcgagaaaatgcttgatgagtgggatctgcgtcatcaggcgtttcatacggcaattgtggcgggctgtggttctcactatttgctgcaaatgcgtgaacggttgtttgatctggcggcgcgttatcgatttatctggctgcggcgaacggtgcttagcgtggaaatgctggaggataaacacgatcagcaccagaccctgactgcggcggtactggcgcgagataccgcgcgcgccagtgagttaatgcgccagcatttactgacgccaattcccattatccagcaggcgatggctggcaattaattactcttccggaatacgcaacacttgccccggataaattttatccgggctttttagcatcggtttattcgcttcgaagattttattgtacagattagcgttaccgtagacctgtttggaaatggcactcagagtgtcgccagacttaacggtataaaactggctggcagtggctggtgtcgccgttttcacctgatcatcgacactggcaataccggaaatattccccaccgcaacaaggattttctccttcgcctcctgactcaggccgtcaccagtgaccgtcgctttgccgtcggcaatttgaatattcactttatcggcatccggtataccggttttgttcagatgctcctgcaccttcttcgcctgatcgtctttatcgtgctgacctgtaaccgcgtcccagagtttttctccggcatctttcacaaaattgaacagacccatagctacctcattcgttaacggaaacactcagaaagtgtagcagaggaacgcggcgcgttaacgccgcggggatgagcacaggtttaatcgcgggtttgcacccagaacgcgtgaatcaaaccggggatatacccaagcagtgtcaacagaatattaataatgaacgcccaaccgaaccctttaccgagcagcacgccgagcggcggcagaatgatggtgatgacgattctccagaaacccatatgtactccctataagaaaattactcattgtttaaaaagagattttatctcttaagcgtagtaattttagcggagcctgccagtttcagcttacgcttttactctcatttacgctgctgaggctggtatatgttgcatttttagtttagagtttacttaatttagaaaatacttaaataaatatgactgaactcgcgcaattacaggccagtgccgaacaggcagcggccttattgaaagcaatgagccaccctaaacgattgctgattctgtgcatgcttagcggttcccccggcaccagcgcgggagagctgacgcgcattaccggactgagtgcctctgcgacaagtcagcatctcgctcgtatgcgggacgaagggcttatcgacagccaacgggatgcccaacgcattctatattccattaaaaatgaggcggtaaatgccattatcgccaccctgaaaaatgtctattgtccgtaaggagtcactatggctttgacaaccattagcccgcatgatgcacaagaattaatcgcacgcggcgcaaagttaatcgatattcgtgatgctgatgaatatcttcgtgaacatattcctgaagcagatctggctccattatccgtgctggaacagagtggtcttccggctaaattacgtcacgagcaaattatattccactgccaggcaggtaaacgcaccagtaataatgccgataaattagcagcgattgccgcccccgcagaaatctttttactcgaagatgggattgatggctggaaaaaagcaggattgccagtagcggtaaataaatctcaacccttgccgttaatgcgccaggtgcagatcgctgcgggtggtttaatattaatcggcgttgtactgggttataccgtaaatagcggtttcttcttattaagtggctttgttggtgccgggttactgtttgcaggaatcagcggtttttgtggaatggcaaggttgttagataagatgccgtggaaccaacgagcttgagaagcgacgccggacgcgccctagcagcgacatccggcctcagtaattagatcaggaaatcgtcgagagatttaccttctgccagcgcctgagcaattggcttcggtgtacggccctgaccggtccaggttttagtttcaccgttaacatcggtgaatttatatttcgccggacgcggctggcgttttttaccagcgcgtggtgcagcagcagagctattacccaataactcttccgggttaattccgtcagctttcatcagctccagccaggtgctaattttttcctggcgctctgccagttcacgctgctgctgttcttcttcttcacgtctttctttagtgacaaccctgaatttttcgagcatttcttcaagaacgtcaatggagaattcgcgagccatcgcacggagggtgcgaatgttatttaaactttgtaacattacggacataataaagaaaaccttttaacgccaaaacaaaaaaagtatttcgtcgcgtagtgtaagcgatcacttattatatttccacaaaatttaatctatttacagtcctgcgcgagattatttcagctgttattttctgaaactctcagaataatttcaagattatatattagccattttgatgagtaatttagattattggtgaacagagcggcgctctctgctcgctaattccgcaagcctgacaaaatcaaagtgaataaaaatgcaatataacagaataaaagaaaacatccatcactggtgctttctgctgttaatgtacattgtctggcataaaaaatgctgaaaatgacccagctactacatacaccgaattctctacgcttatagcgttacctcacccccaaactttcattagtgatattaaaggtaaggccatatctaattgatttaattaaaaataaatcatatcggcatgtaaaaatccacaatgtacaaaaaacgagccgttacggaatattttatctacaaaaactgactaaataaaaatttttcactaattgattagtcatagccagcgatatacgctatgcgaaaatgcagatggcaatgagatccactgctttcatctccattaacatcccattacgcttttattaaggagcattagcatgttcagtccgcagagtcgcttgcgtcatgcagttgcagatacgttcgcgatggttgtttactgttctgtcgtgaacatgtgtattgaagttttcctctccggaatgagcttcgaacagtctttttattccagattggtagcgattccggtgaacatcttaattgcatggccatacggtatgtaccgtgatctgtttatgcgcgcggcacgcaaagttagcccgagcggctggataaaaaatctggcggatatcctggcttatgtgacgttccagagtccggtgtatgtggcgatcttgttagtggtgggcgcagactggcatcagattatggcggcggtcagtagtaacatcgttgttagcatgttgatgggggcggtttatggctacttcctcgattattgccgccgactgtttaaagtcagccgttaccagcaggtaaaagcctgactcttcttttcgcgactggcatcgccagtcgcgtctttaactggcttcgccaaataaaccattcaaataacgttcaagcgcaacacggctactaaagccatgcgggataccgtaatgctcgtgtcgctcgcctgctaaatagagcggaaattgctggtaatgatcgcaagttttaatatcggaagcgggttcagccagtgtgctactgcgttcttttaatgttggatgaattaccagagcggtacgtcccattcgcgcttcgcgattaacatagacataattttccccacggcggtaaccatacgctttctgggttaccacatcgacagtaaaaccgactttttcaagtacgcgcgccacctcgtctggtcgtaaatacatatttgatcctcgttattatcaaccgcgggcctaccttacctgattgcgcattcacaacgctttcagaaaagtccataaagccgcgatgaacctcagttaagaaaattatggtctacactgaaaattacatcgaattctaatgggggatcatatgtttaaccgaccgaaccgcaacgacgttgatgatggcgtgcaggatatccagaatgatgtcaatcaattagctgacagcctcgaatctgtattgaagtcctggggcagcgacgccaaaggggaagctgaagccgcacgcagtaaagctcaggcattgctgaaagaaaccagggcgcgaatgcatggtcgtactcgcgtccagcaagccgcgcgcgatgccgttggctgcgcggattcttttgttcgtgaaagaccctggtgtagcgtgggtacagcagctgcggtaggtatttttatcggcgcactgttaagcatgcgcaaaagctaatgcaaaaatgataataaatacgcgtctttgaccccgaagcctgtcttcggggtttctttttgcctggtgaatcacaaaaatccccctaccccgtcacgctcatatccagggtaatttcgaccactatttgctatatattgtgtggttgaatcttttttcaactacatctagtatctctgtatcaacagagagacaacccgacgcgtatcatcgcgccgtatcttcattttaaacggaaatacgaatcatgcgcattactatttacactcgtaacgattgcgttcagtgccacgccaccaaacgggcgatggaaaaccggggctttgattttgaaatgattaatgtcgatcgcgttcctgaagcggcagaagcgttgcgtgctcagggctttcgtcagttgccggtagtgattgctggcgatcttagctggtctggtttccgtccggacatgattaaccgtctgcatccagcgccacacgcggccagtgcatgagccagctcgtctacttctccagcagctccgaaaacacgcagcgttttatcgaacgtttaggtctgcccgcggtgcgcatcccgctcaatgagcgggaacggattcaggtagacgagccttacatcctgatcgtgccctcttacggcggcggcggtacggctggcgcggtgccacgacaggtaattcgctttttaaacgacgagcacaaccgggcgttgcttcgcggcgttattgcttctggtaatcgcaactttggtgaggcgtatggccgcgccggagatgtgattgcccggaaatgcggcgtgccgtggctgtaccgttttgaactcatgggtacgcaaagcgatatcgaaaacgttcgtaaaggagtaaccgaattttggcaacgacaaccgcagaatgcctgacgcaggaaacgatggattaccacgcgctgaatgcgatgcttaacctctacgatagcgcaggtcgcattcagttcgataaagaccgccaggccgttgacgcctttattgcgacgcatgtgcgtccgaacagtgtgaccttcagtagccagcagcagcgcctgaactggctggtcaacgaaggttactatgatgaaagcgttcttaatcgctactctcgcgactttgtcattacgctgtttacccacgcacacaccagcggttttcgtttccagacattcctcggggcatggaagttttacaccagctatacgttgaagacattcgacggtaaacgttatctggaagattttgccgatcgagtaacgatggtggcgctgacgctggcacaaggcgatgagacgctggcgttgcaactgaccgatgaaatgctgagtggacgctttcagccagccacgccaacattcctcaactgcggtaagcagcagcgcggcgaactggtttcctgttttttgctgcgtattgaagacaatatggagagcattggtcgggcggtaaattccgcactgcagctgagcaaacgcggcggcggcgtagcatttttgctgagcaatctgcgagaagcgggcgcgccaattaaacgtattgaaaatcaatcttctggcgtaattccggtgatgaaaatgctggaagacgcattttcctatgccaaccaactcggcgctcgtcagggggctggtgcagtctatttacatgctcatcatcccgatattctgcgttttctcgacacgaaacgggaaaatgccgacgaaaaaatccgcattaaaacactgagccttggcgtggtgatcccggatatcactttccatctggcaaaagagaatgcgcagatggcgctgtttagcccttatgacgtagagcgagtttatggcaagccgtttgccgatgtggccatcagccaacactatgacgaactggttgccgatgaacgcattcgcaaaaaatacctcaacgcccgtgatttcttccagcgactggcagaaatccagtttgagtccggctatccctacatcatgtatgaagacacggtaaaccgtgctaaccctatcgccgggcgcataaatatgagtaatctctgcagtgaaattttgcaggttaacagcgccagtgagtatgacgagaatctcgactatacccgcacaggccatgatatttcctgcaatttaggtagcttgaatattgcgcacaccatggattcccccgattttgcccgcacggtagagactgccgtgcgcggtttaacggcagtaagtgatatgagtcatatccgcagcgtgccgtccatcgaagccggaaatgccgccagccacgccatcggactggggcagatgaatttacacggctatctggcgcgagaaggcatcgcttatggtagcccggaagcactggatttcaccaatctctatttctatgccatcacctggcatgcactgcgtaccagcatgttgctggcacgcgaacgcggtgaaaccttcgccgggttcaaacagagtcgctatgccagtggtgaatattttagccaatatctgcaagggaactggcagccgaaaacggcgaaagttggcgaactgtttacccgtagcggtattacgttacctacccgtgagatgtgggcgcagctgcgcgacgacgtgatgcgctacggcatatacaaccagaatcttcaggcggtgccgccaaccggttctatctcttatatcaaccatgctacgagcagtattcatccgattgtggcgaaagtagagatacgcaaagagggcaaaacaggacgcgtttactaccctgccccgtttatgactaacgagaatctggcgctgtatcaggacgcttacgaaattggcgcagaaaagatcatcgacacctacgcggaagcgactcgccatgtcgatcaggggctgagcctgacgctttttttccccgataccgccaccactcgcgatatcaacaaagcgcagatttacgcctggcgcaagggtatcaaaacgctctattacatccgcctgcgtcagatggcgctggaaggcactgaaattgaaggctgcgtctcctgtgcactttaaggaatatctatgaaactcagtcgtatcagcgccatcaactggaacaagatatctgacgataaagatctggaggtgtggaatcgcctgaccagcaatttctggctaccagaaaaggtgccgctgagcaacgatattcctgcctggcagacattaactgtcgtagaacaacaactgacgatgcgcgtttttactggcctgacgctgctcgacacgctgcaaaatgttatcggcgcgccttctctgatgcccgatgcactcacgcctcatgaagaagcggtattaagcaatatcagctttatggaagcggttcatgcccgctcttacagtagcattttcagcacgctatgccagaccaaagatgtcgatgccgcctacgcctggagtgaagaaaacgcaccgttgcagcgaaaagctcagattattcagcaacattatcgcggtgatgatccgctgaaaaagaaaatcgccagtgtgtttcttgaatcttttttgttctattccggtttctggctgccgatgtatttttccagccgcggaaagctgaccaataccgcggacctgatccgtctgattatccgcgatgaagcagtccacggttactacataggctataaatatcagaaaaacatggaaaagatatctctgggacaacgtgaagagttgaagagtttcgccttcgatttgttgctggaactctacgacaacgagttgcaatacaccgatgagctgtacgccgaaaccccgtgggctgacgatgtgaaagcgtttctctgttacaacgccaataaggctttgatgaatctgggctacgaaccgttatttcccgcagaaatggcggaagtgaatccggcaatcctcgccgcgcttagcccgaatgccgatgaaaatcacgatttcttttccggtagtggctcctcttatgtgatggggaaagcggttgaaacagaagatgaagactggaatttctgagggtgttattttcaaaaatatcactacccgcagcagggaaataattcccgccaaatagctttttatcacgcaaataatttgtggtgatctacactgatactctgttgcattattcgcctgaaaccacaatattcaggcgttttttcgctatctttgacaaaaaatatcaactttctcgatttgctctcagcccttatatcacgggaaattccggcgatttgctcgcatcaatattcatgccacatttgccatcaggggttgcctcagattctcagtatgttagggtagaaaaaagtgactatttccattgggtaatatatcgacatagacaaataaaggaatctttctattgcatggcaattaaattagaaattaaaaatctttataaaatatttggcgagcatccacagcgagcgttcaaatatatcgaacaaggacttagtaaagaacaaattctggaaaaaactgggctaagccttggcgtaaaagacgccagtctggccattgaagaaggcgagatatttgtcatcatgggattatccggcagcggtaaatccacaatggtacgccttctcaatcgcctgattgaacccacccgcgggcaagtgctgattgatggtgtggatattgccaaaatatccgacgccgaactccgtgaggtgcgcagaaaaaagattgcgatggtcttccagtcctttgccttaatgccgcatatgaccgtgctggacaatactgcgttcggtatggaattggccggaattaatgccgaagaacgccgggaaaaagcccttgatgcactgcgtcaggtcgggctggaaaattatgcccacagctacccggatgaactctctggcgggatgcgtcaacgtgtgggattagcccgcgcgttagcgattaatccggatatattattaatggacgaagccttcagcgcgctcgatccattaattcgcaccgagatgcaggatgagctggtaaaattacaggcgaaacatcagcgcaccattgtctttatttcccacgatcttgatgaagccatgcgtattggcgaccgaattgccattatgcaaaatggtgaagtggtacaggtcggcacaccggatgaaattctcaataatccggcgaatgattatgtccgtaccttcttccgtggcgttgatattagtcaggtattcagtgcgaaagatattgcccgccggacaccgaatggcttaattcgtaaaacccctggcttcggcccacgtagcgcactgaaattattgcaggatgaagatcgcgaatatggctacgttatcgaacgcggtaataagtttgtcggcgcagtctccatcgatagccttaaaaccgcgttaacgcagcagcaaggtcttgatgcggcgctgattgatgcgccgttagcagtcgatgcacaaacgcctcttagcgagttgctctctcatgtcggacaggcaccctgtgcggtgcccgtggtcgacgaggaccaacagtatgtcggcatcattagcaaaggaatgctgctgcgcgctttagatcgtgagggggtaaataatggctgatcaaaataatccgtgggataccacgccagcggcggacagtgccgcgcaatccgcagacgcctggggtacaccgacgactgcaccgactgacggcggtggtgctgactggctgaccagtacgcctgcgccaaacgtcgagcattttaatattctcgatccgttccataaaacgctgatcccgctcgacagttgggtcactgaagggatcgactgggtcgttacccatttccgtcccgtcttccagggcgtgcgcgttccggttgattatatcctcaacggtttccagcaattgctgctgggtatgcccgcaccggtggcgattatcgttttcgctctcatcgcctggcagatttccggggtcggaatgggtgtggcgacgctggttagcctgattgccatcggcgcaatcggtgcctggagccaggcaatggtgactctggcgctggtgttaaccgccctgctgttctgtatcgtcatcggtttgccgttggggatatggctggcgagaagtccgcgagcggcgaaaattattcgtccactgcttgatgccatgcagaccacgccagcgtttgtttatctggtgccaatcgtcatgctatttggtatcggtaacgtgccgggcgtggtggtgacgatcatctttgctctgccgccgattatccgtctgaccattctggggattaaccaggttccggcggatctgattgaagccagccgcagtttcggtgccagcccgcgccagatgctgttcaaagttcagttaccgctggcgatgccgaccattatggcgggcgttaaccagacgctgatgctggccctttctatggtggtcatcgccagcatgattgccgtcggcgggttgggtcagatggtacttcgcggtatcggtcgtctggatatggggcttgccaccgttggcggcgtcgggattgtgatcctcgccattatcctcgatcgtctgacgcaggccgttgggcgcgacagtcgcagtcgcggcaaccgtcgctggtacaccactggccctgttggtctgctgacccgcccattcattaagtaactctgcacttgcccggtgacgccgggcattatcaccctgccaaaaaaaggaataacaatgcgacatagcgtactttttgcgacagcgtttgccacgcttatctctacacaaacttttgctgccgatctgccgggcaaaggcattactgttaatccagttcagagcaccatcactgaagaaaccttccagacgctgctggtcagtcgtgcgctggagaaattaggttataccgtcaacaaacccagcgaagtagattacaacgttggctacaccagccttgcttccggcgatgcaaccttcaccgccgtgaactggacgccactgcatgacaacatgtacgaagctgccggtggcgataagaaattttatcgtgaaggggtatttgttaacggcgcggcacagggttacctgatcgataagaaaaccgccgaccagtacaaaatcaccaacatcgcacaactgaaagatccgaagatcgccaaactgttcgataccaacggcgacggaaaagcggatttaaccggttgtaaccctggctggggctgcgaaggtgcgatcaaccaccagcttgccgcgtatgaactgaccaacaccgtgacgcataatcaggggaactacgcagcgatgatggccgacaccatcagtcgctacaaagagggcaaaccggtgttttattacacctggacgccgtactgggtgagtaacgaactgaagccgggcaaagatgtcgtctggttgcaggtgccgttctccgcactgccgggcgataaaaacgccgataccaaactgccgaatggtgcgaattatggcttcccggtcagcaccatgcatatcgttgccaacaaagcctgggccgagaaaaacccggcagcagcgaaactgtttgccattatgcagttgccagtggcagatattaacgcccagaacgccattatgcatgacggcaaagccagtgaaggcgatattcagggacacgttgatggttggatcaaagcccaccagcagcagttcgatggctgggtgaatgaggcgctggcagcgcagaagtaatttttattcgggcggataaggcgtttttgccgcatccgccgttctgtgcacaatgcctgatgcgacgctggcgcgtcttatcatgcctacaaaccacatcgcacatttcaacaatctatctttcatcccatattcatcaacatccgctattattgatttccagcttaatcatcacctgatgaacaaaaataatgactaaacctaatcatgagcttagcccggcgctgatcgtgctgatgtctatcgccaccggtctggcggtagccagtaactattacgcccagccattgctcgacaccatcgcgcgtaacttttccctttccgccagtagcgcaggctttattgttaccgccgcgcagttgggctatgccgcaggtctactgtttcttgttcccctcggtgatatgtttgaacgccgccgcctgattgtcagcatgaccttactggcggcatgttgattaccgccagcagtcagtcgctggcgatgatgatcctcggtacggcattaaccggtttattcagtgtcgtggcacaaattctggttccgctggcagcgacgctggctagtccggataaacgcggcaaagtggttggcactattatgagcggtctgctgttggggatcttgctggcacggacagttgccggattgctggcgaatctcggcggctggcgcaccgtcttttgggttgctagcgtgttaatggcactgatggcgctggcattatggcgtggtctgccacaaatgaaaagtgaaacccacctcaactacccacagttgttgggttccgttttcagtatgtttatcagcgataaaattctgcgtacccgcgcgttgctgggctgcctgacctttgccaatttcagcattctctggaccagtatggcctttttgcttgccgctccaccttttaactacagcgatggtgtcattggtctgtttggacttgcgggagctgccggagcgttgggcgctcgtccggcgggcggttttgccgataagggcaaaagccaccacaccacaactttcggtctgctgctgctattacttagttggctggcgatctggtttggtcacacttccgtactggcgttgattatcggaatcctggtgctggatctcaccgtgcagggcgtgcatatcactaaccagacggtaatttatcggatacatcctgatgcgcgcaatcgcctgaccgcaggttacatgactagctactttattggcggtgccgccggtagcctaattagtgccagtgcctggcaacatggcggttgggctggcgtttgtctggctggcgcgacgattgccctggttaacttactggtctggtggcgaggttttcatcgtcaggaagccgcaaattaagcaatcagcaaccgttttcgtggctttacacttataagggtgttaagaagcccatcagtctgataaggttaagatattcattcagtctatttataatattaacaatcgttaagcgtacactctatggaaagccctactccacagcctgctcctggtagcgcgaccttcatggaaggatgcaaagacagtttaccgattgttattagttatattccggtggcctttgcgttcggtctgaatgcgacccgtctgggattctctcctctcgaaagcgtttttttctcctgcatcatttatgcaggcgcgagccagttcgtcattaccgcgatgctggcagccgggagtagtttgtggattgctgcactgaccgtcatggcaatggatgttcgccatgtgttgtatggcccgagtctgcgtagccgtattattcagcgtctgcaaaaaagcaaaaccgccctgtgggcgtttggcctgacggatgaggtttttgccgccgcaaccgcaaaactggtacgcaataatcgccgctggagcgagaactggatgatcggcattgccttcagtagttggagtagctgggtatttggtacggtaataggggcattctccggcagcggcttgctgcaaggttatcccgccgttgaagctgcattaggttttatgcttccggcactctttatgagtttcctgctcgcctctttccagcgcaaacaatctctttgcgttaccgcagcgttagttggtgcccttgcaggcgtaacgctattttctattcccgtcgccattctggcaggcattgtctgtggctgcctcactgcgttaatccaggcattctggcaaggagcgcccgatgagctatgaggttctgctgcttgggttactagttggcgtggcgaattattgcttccgctatttgccgctgcgcctgcgtgtgggtaatgcccgcccaaccaaacgtggcgcggtaggtattttgctcgacaccattggcatcgccagcatatgcgctctgctggttgtctctaccgcaccagaagtgatgcacgatacacgccgtttcgtgcccacgctggtcggcttcgcggtactgggtgccagtttctataaaacacgcagcattatcatcccaacactgcttagtgcgctggcctatgggctcgcctggaaagtgatggcgattatataacccacaagaatcatttttctaaaacaatacatttactttatttgtcactgtcgttactatatcggctgaaattaatgaggtcatacccaaatggatagtagctttacgcccattgaacaaatgctaaaatttcgcgccagccgccacgaagattttccttatcaggagatccttctgactcgtctttgcatgcacatgcaaagcaagctgctggagaaccgcaataaaatgctgaaggctcaggggattaacgagacgttgtttatggcgttgattacgctggagtctcaggaaaaccacagtattcagccttctgaattaagttgtgctcttggaagttcccgtaccaacgcgacgcgtattgccgatgaactggaaaaacgcggttggatcgaacgtcgtgaaagcgataacgatcgccgctgcctgcatctgcaattaacggaaaaaggtcacgagtttttgcgcgaggttttaccaccgcagcataactgcctgcatcaactctggtccgcgctcagcacaacagaaaaagatcagctcgagcaaatcacccgcaaattgctctcccgtctcgaccagatggaacaagacggtgtggttctcgaagcgatgagctaacgcgtcatctcgctcaaaaatccagatttataaaagaaaaaatgactggccagcatcgcaacatgctggcctttttggcaagcaggtcggctcagccgatgagttaagaagatcgtggagaacaatatgagcgcaaatgcggagactcaaaccccgcagcaaccggtaaagaagagcggcaaacgtaagcgtctgctcctccttctcaccttgctctttataattattgccgtagcgatagggatttattggtttttggtactgcgtcacttcgaagaaaccgatgacgcatacgtggcagggaatcaaattcaaattatgtctcaggtgtctggcagcgtgacgaaagtctgggccgataacaccgattttgtaaaagaaggcgacgtgctggtcactctcgacccgacagatgctcgccaggcgtttgaaaaagccaaaactgcactggcttccagcgttcgccaaacccaccagctgatgattaacagcaagcagttgcaggcgaatattgaggtgcagaaaatcgccctcgcgaaagcacaaagcgactacaaccgccgtgtgccgctgggcaatgccaacctgattggtcgcgaagagctgcaacacgcccgcgacgccgtcaccagtgcccaggcgcaactggacgtcgcgattcaacaatacaatgccaatcaggcgatgattctggggactaaactggaagatcagccagccgtgcaacaggctgccaccgaagtacgtaacgcctggctggcgctggagcgtactcgtattatcagtccgatgaccggttatgtctcccgccgcgcggtacagcctggggcgcaaattagcccaacgacgccgctgatggcggtcgttccagccaccaatatgtgggtggatgccaactttaaagagacgcagattgccaatatgcgtatcggtcagccggtcactatcaccacggatatttacggcgatgatgtgaaatacaccggtaaagtggttggtctggatatgggcacaggtagcgcgttcagtctgcttccagcgcaaaatgcgaccggtaactggatcaaagtcgttcagcgtctgcctgtgcgtatcgaactggaccagaaacagctggagcaatatccgctgcgtatcggtttgtccacgctggtgagcgtcaataccactaaccgtgacggtcaggtactggcaaataaagtacgttccactccggtagcggtaagcaccgcgcgtgaaatcagcctggcacctgtcaataaactgatcgacgatatcgtaaaagctaacgctggctaatccagaggtgcgtgtgatgcaacagcaaaaaccgctggaaggcgcgcaactggtcattatgacgattgcgctgagtctggcgacattcatgcaggtgctggactccaccattgctaacgtggcgatccccactatcgccgggaatctgggcagtagcctcagccagggaacgtgggtaatcacttctttcggggtggcgaatgccatcagcatcccgcttaccggctggctggcaaagcgcgtcggggaagtgaaactgttcctttggtccaccatcgcctttgctattgcgagctgggcgtgtggtgtctccagcagcctgaatatgctgatcttcttccgcgtgattcaggggattgtcgccgggccgttgatcccgcttagccaaagtctattgctgaataactacccgccagccaaacgcagcatcgcgctggcgttgtggagcatgacggtgattgtcgcgccaatttgcggcccgatcctcggcggttatatcagcgataattaccactggggctggatattcttcatcaacgtgccgattggcgtggcggtggtgttgatgacactgcaaactctgcgcggacgtgaaacccgcaccgaacggcggcggattgatgccgtggggctggcactgctggttattggtatcggcagcctgcagattatgctcgaccgcggtaaagagctggactggtttagtagtcaggaaattatcatccttaccgtggtggcggtggtggctatctgcttcctgattgtctgggagctgaccgacgataacccgatagtcgatctgagcttgtttaagagccgcaacttcaccatcggctgcttgtgtatcagcctcgcgtatatgctctacttcggcgctattgttctgctgccgcagttgttgcaggaggtctacggttacacggcgacctgggcaggtttggcctctgcgccggtagggattattccggtgatcctgagcccgattatcggccgcttcgcgcataaactggatatgcggcggctggtaaccttcagctttattatgtatgccgtctgcttctactggcgtgcctatacctttgaaccaggtatggattttggcgcgagcgcctggccgcagtttatccaggggtttgcggtggcctgcttctttatgccgctgaccaccattacgctgtctggtttgccaccggaacgactggcggcggcaagcagcctctctaactttacgcgaacgctggcggggtctatcggcacgagcataaccacgaccatgtggaccaaccgcgagagcatgcaccatgcgcagttgactgagagcgtaaacccgttcaacccgaatgcccaggcgatgtacagtcaactggaagggcttgggatgacgcaacagcaggcaagtggctggattgcccagcagatcaccaatcaggggctgattatttccgccaatgagatcttctggatgagtgccgggatattcctcgtcctgctggggctggtgtggtttgctaaaccgccatttggcgcaggtggcggcggaggcggtgcgcactaagtacaactaagccagttcatttgaactggcttttttcaattaattgtgaagatagtttactgattagatgtgcagttcctgcaacttctctttcggcagtgccagttcttcgttgctgttgatgcgtacgtcacgttccagaatgctacgcgcaatatcctgcgcttcctgcaagctgtgcatctggtaagtgccacactggtagacgttcagttccgggatctgattctgatcctgcactttcagcacgtcttccattgccgttttccaggcatcagcaacacgctgctcatctggcgtaccaatcagactcatataaaaaccggtgcggcagcccattgggctgatatcgataatctctacaccattaccgttaagatggttacgcataaaaccagcaaacaggtgctccagggtatggatccctctttctggcatcacttctttgttcggcacgcagaagcgcagatcgaacacggtgattgcgtcgccatgcggggtgttcattgttttcgccacccgaactgcaggcgcttccatccgggtatgatcgactgtgaagctatctaacaacggcatttagccacctccggtaatttttttaaaaattttctgaactctttcttcccaggcgagtctgagtatatgaaagacgcgcatttgttatcatcatccctgaattcagagatgaaattttggccactcacgagtggcctttttcttttctgtcaggcgtgtttttccagccacaccgcaaacggttcggtatcagcggcttccatttcctgctgacggcgttcagacgcctcgcgctcggctacaaaatcctcttcgcgcagaatttccagcggctcttcacgcagcagattacggtaggcttctgcaaatgctttgcctgttccgccaataccagtatcaatcatagaccttaagatacgggcagagaaagtcagatcgggattatcgaagcaggcaaccagttcatcacacactttctgatacgcttcgccgccgttaatactatccagcgtttgcgcgacgcgtttcagatcgcggaacagatctttacccacctgcggtaacgggaactgtgcggtttcgcagccgatacccagcgtcagacccggtttgcgaccttcgaggatcacccggttccagttaacgcgtgtacaggcaagttcgctactgctcatttccggtgcatcagccagcgcacaccagaccataaacaggtcgaggaatcgcacctgctgttcatctacaccaatcgggctgaacgggttgatgtccaggctacgcacttcaatatattcaatgccgccacgtaacagcgcatcagaagggctctcgccgctgcgggtaacgcgttttggacgaatcggcgcgtacagttcgttttcaatctgcaacacgttgctgttgatttgcagcctcttaccgtctttctcaataccaatcttcgcgtactcttcgcttggcgttttgattgcctgtttaaggcccgctacgtactcgtaaagatcgttgaaggtaataccaagattgctttggcttttattggtatagccgagatcgctcaaacgaagagaggtcgcatacggcaggtaatacataccgcactcggttttctcaaacggcaggctcgttggttttccttgcaggaaagaagaacaaatcgccggagatgcaccaaacagataaggaatgacccaaccgaaacgatagtaattgcggataacgcggaaatagcccgcagaaattttctctttggcatcagcgccgctgatatcaccgcacttcgcttgccagaatgccattggcaaagagaaattgtagtgcacgccggaaatggtttgcatcagcgcgccgtagcgatttttcagcccttcacgatacagcgttttaaagcgtccggtgttagaagtgccgtactgtgccagttcgatgtcctgaccttctgcgatgtagcatggcatacttaacggccacatccgctcatcgcccatattgcgcgccgtataacgatgcagatcgcgcataaaggtcagcatatgttcaatatcaccatccactggtgtaatgaattccagcaatgcttccgcaaaatcggtagtaatccatttgtgcgtcagtgcggaacctaatgcttcaggatgacctgttgttgccagtgtgccatcagcattaacacgcaaagtttcgcgctccagcccacgctgtatcccctttaacgcctgaggatgtttttccagccaggccagcgcctgacttacgtccgggatcaaattgacctcccgcctgtcaaaatcgttttaattagcataactgtaatggtgaccatatgtgcaggcctacaattagtgccaccacatcatgccctgaacggtcgctgctgcaactgcaacatagcgtaacgctttaccaaggcacaaaaaaaagattaccggtccccagctgatgcgcatccatcccgctaacagacacagtaaatcgccaaccacgggcatccagcttaataatagcgtgactgcaccatagcgtttcagccagccggtagctttctcttgccagcggcttgttttacgcaatggaaagaaacgcccaaggataacgttagttaaccctccaaggctattacccattgttgctgttaaaactaaaacccagggatgactgatcccggaaagcaacattgccaccagcacgacttcggagttgccgggtaatagtgtagcgctgagaaaactactggcaaacaagctgaaaaggcttaacgcttcactcacagcaagcgaacatccacggcgtccatgcctgctgcacgggccgcctgaataccgaaatcggcatcttcaaagaccacacactgcgtcggttgcacgcccatacgctgcgcgcacaacaaaaatgtgtctggcgcgggtttatggtgtttgacgtgatcggcagcgacgacggcgtcaaaataatggcgtaatcccaggtgcgccagcaatgcctcagcgatggcgctttcactccccgttcctacagccattgggcgacgaccatgccaacttttcaccacatcaacaagaggaagcggttcgacgctatccagcagcatacttcttactgcttctgttttttcacgcgctaacgcatgcgggtcgagatcggcctgattcagctcaataattgcctgagcaatacgccaggtggggcttccattaagcgcaatcatcgcctgaatatcgtactgaagaccgtagtgccctaatacttcgcgccacgctttacggtgcgtaggctccgtatccaggattgtgccatccatatcaaaaattaaacctgcataacgctcgtacatggtcttctcgcaagtcgaaaaatatgacgctactttagcgtaattgcttgattttgtcgctgatggcgaaggagaagaaaattcaggaaatggataaaggagttatttagaaatgagatatttttgaaggaaattttttggagaagatggtgcatccgggaggatgactcactgacgttcgcccttcgggccgttgctggcgcaacgttatccttcctggtgcctgcggttaataccgctatctcttcgataccttcattgctgaaggttacggagaatatggtgcatccgggaggattcgaacctccgaccgctcggttcgtagccgagtactctatccagctgagctacggatgcatcgggaaaacttattctactgctgatattgataccgctactaaagccatatcaattaagagatggtgcatccgggaggattactcgccttgcggctcgcccttcgggccgttgctaaagcaacgttatcatccctagtgcctgcggttaattccgctacctcttcgataccttcattgctgaagatttcggagaatatggtgcatccgggaggattcgaacctccgaccgctcggttcgtagccgagtactctatccagctgagctacggatgcatcgggaaatttattttactgctgatattgataccgctactaaagccatatcaagtaagagatggtgcatccgggaggattcgaacctccgaccgctcggttcgtagccgagtactctatccagctgagctacggatgcatcgggaaacttactttactgcagattttttgataccgctactaaagccgtatcaagtaagagatggtgcatccgggaggattactcgccttgcggctcgcccttcgggccgttgctaaagcaacgttatcctccctggtgcctgcggttattaccgccacctcttccataccttcatcgctgaaagtacgtagaatatggtgcatccgggaggattcgaacctccgaccgctcggttcgtagccgagtactctatccagctgagctacggatgcaaatggcggtgaggcggggattcgaaccccggatgcagcttttgaccgcatactcccttagcaggggagcgccttcagcctctcggccacctcaccacacgcctcttacgagtgcttcgaagaacttgtttatcgctcatcgtcgctgcgtggcgcacatattactttctgagacttataagtcaaacaatttttcctacacttttatcgtttgcacacttcacgttcaattagtctgtaaaaacgtcaaaaagagtgttttatcaacagaagaatggaggtctgacagatagtagtaatgcaaaaaaatggagacttaagttgaatgaacgggagtaaagcgaaaagactatagagtgaaggagaaattttgagggtgcgtctcaccgataaagatgagacgcggaaagattagtaactggactgctgggatttttcagcctggatacgctggtagatctcttcacggtgaacagaaacttccttcggggcatttacgccaatacgtacctggttgccctttacccctaaaactgtcacggtgacctcatccccaatcatgagggtctcaccaactcgacgagtcagaatcagcattctttgctccttgaaagattaaaagagtcgggtctctctgtatcccggcattatccatcatataacgccaaaaagtaagcaatgacaaacacattacatctaagcagtcatggcattacattctgttaaacctaagtttagccgatatacacaacttcaacctgactttatcgttgtcgatagcgttaatgcgaatgccgtgaagcgagtccacggcattgcctgacgcttatattattgcaatttcgcgctgacccagcctttcacactggctaacgctgcaggtaaggccgcagcatccgtaccaccggcttgcgccatgtcaggacgtccaccacccttgccgcccacctgctgagcgaccataccaatcagttcccctgctttcacacgatctgtgacgtccttagatacgcctgcaatcagagaaaccttaccttcgactaccgttgccagcacgataattgtgctccccagctgattttttaaatcgtcaaccatggtacgcaacattttcggctcaacaccgctaagctcgctaaccaacagcttaacaccattaacatcaattgccttactggaaagatttgcgctctcctgtgcggcagcttgttctttaagctgttgtaactctttttccagctgacgcgtacgttccagtacactgcgcactttatcagccagattattgctatcgcctttcagcagatgcgcgacttcgcttaagcgatcgctgtctgcatgaacggtggcgatagcaccttctccggttaccgcttcgatacgacgaacgcctgcagcagtaccgctttcagagatgatgcggaacagaccaatatcaccagtgcggctggcgtgagtaccgccacacaactcggtagagaaatcgcccatgctcagcacgcgtacgcgctcatcatacttctcgccgaacagcgccatcgcacctttcgctttcgccgcttcgagatccatgatgttggtttcgatcggcaaattgcgacgaatctgtgtgttcaccaggtcttcgaccgcacgaatctcttctggtttcatcgcttcgttgtgactgaagtcgaagcgcagcaccttgtcgttaaccagactacctttctggcttacatgagtacccagaacctggcgcagcgcagcgtgcatcaggtgcgttgcggagtgattcagacgaatacgggcgcgacgagcctcatcaacatcagcctgcaccgcgtcgcccactttcagagaacccgcagcaagtttaccgatgtgaccaatcgcctggccgtatttctgcgtatcttccaccgcaaaggagaagttagcgcctttcagttcgcctttatcgccaacctgaccgccggattccgcatagaatggcgtttgatccagcacgaccacagcttcctggcctgcattgatggcatcaaccgctttaccatcaacaaacagcgcagtcactttgccgttcagttccagatggtcatagcctttaaattcagatgcactgtcaacacggatcattgcgttgtaatcggcaccaaagccgctggcttcgcgcgcgcgacgacgctgctcttccattgcagcttcaaaaccagcttcgtcaactttgatgttgcgctcacgacaaacatcagccgtcaggtcaaccgggaagccataggtgtcgtacagacggaaagcagtttcaccatccagcgtatcaccagaaagttttgccagctcttcatccagcaacgccagaccgcgctccagagtacgagcaaactgctcttcttcagtcttcagcacctgctcaacctgcgcctgctggcgtttcaggtcttcacccgcagagcccataacgtcgatcagcggaccaaccagtttgtagaagaaggtttctttcgcgccgagcatattaccgtgacgcactgcgcgacgaatgatacgacgcagtacataaccacggttttcattggacggcattacgccatccgcgatcaggaacgcacaagaacgaatgtggtcagcgattacgcgcaggcttttattgctcagatcggttgcgccagtgactttcgctaccgcctggatcagcgtgcggaacaggtcgatgtcatagttagagttaacgtgttgcagcaccgcagcaatacgctccagacccataccggtatctacagacggcttcggcagcggttccatcgtgccatcggcctggcggttgaactgcatgaagacgatgttccagatctcaatgtagcggtcgccgtcttcttccgggcttcccggagggcccccccaaatgtggtcgccgtgatcgtagaagatttcggtgcacgggccgcacggaccagtgtcacccatctgccagaagttgtcagatgcgtatggcgcacctttgttatcgccgatgcgaataatacgttcgcgcgggatccctacttctttttcccagatttcgtaggcttcgtcgtcgctttcatagacggtaacccacagacgctctttcggcagggcaaaccatttttcgctggtcagcagttcccatgcaaactgaatggcatcgtgtttgaaatagtcgccgaagctgaagttgcccagcatttcgaagaaggtatggtgacgcgcggtgtaaccgacgttttccaggtcgttgtgtttaccacccgcacgcacgcagcgttgggaagtggtagcgcgggaataattacgcttgtcgagcccaaggaacacatccttgaactggttcatcccggcgttggtaaacaacaaagttgggtcgttatggggtaccagggagctgctggcaactacctgatgtcccttactatggaaaaagtcgagaaacgcctgacggatctcagcggtgctcttgctcataattatcctgaaatcaagctaacgaaatatcgccaccagctccagcgtgtcttaaccgccgggctggtaactgaaaagtgggaataagataagttttcttgactgggaagtaaaataccgtatgcgttcagtcggcaaaatttcgccaaatctcctggatatcttccatcagatagccacgatagagcagaaaacgctggatcttaactttttcactaaagacagttggcaaaggttcgccatattttcgcgtcgcctgatcgcgcgccagtgcgcaccagtcgatgtcacattcacgcatcgctttttctgtcgcttcgcgggaaatacctttctgattcagttcctggcgaatacgcgcaggtccataacctttgcggctacggctggcgataaagcgcgcaacaaatcggctgtcatcgagatagccatgttcatggcaccaggcaataacgcgctcgtaatcttctgccgtagcatcaatctcttctgggccatttttgcccataatcggtgccgcgagtttacgtcgcagttcttgctcactgtgatcgcgcaccgccagaatgcgtaccgcacgatccaacaggcgagcatatgccgggcgacgggatgtactttctgtcatggcatatccttacaacttaaaaaagcaaaagggccgcagatgcgacccttgtgtatcaaacaagacgattaaaaatcttcgttagtttctgctacgccttcgctatcatctacagagaaatccggcgtactgttcgggttgctcagcagcaactcacgtactttcttctcgatctctttcgcggtttccgggttatctttcagccaggcagtcgcattcgctttaccctgaccgatcttctcacctttgtagctgtaccacgcgcctgctttctcgatcagcttctcttttacgcccaggtcaaccagttcgccgtagaagttgataccttcgccgtagaggatctggaattcagcctgtttaaacggcgcagcgattttgttcttcaccactttcacgcgggtttcgctacccaccacgttttcgccctctttcaccgcgccgatacgacggatgtcgagacgaacagaggcgtagaatttcagcgcgttaccaccggtagtggtttccgggttaccgaacatcacaccaattttcatacggatctggttgatgaagatcagcagcgtgttggactgcttcaggttacccgccagcttacgcatcgcctggctcatcatacgtgccgcaaggcccatgtgagagtcgccgatttcgccttcgatttccgctttcggcgtcagtgccgccacggagtcaacgacgataacgtctactgcgccagaacgcgccagggcgtcacagatttccagtgcctgctcgccggtgtccggctgggagcacagcaggttgtcgatatcgacgcccagtttacgtgcgtagattgggtccagcgcgtgttcagcatcgataaacgcacaggttttaccttcacgctgcgctgcggcgatcacctgcagcgtcagcgtggttttaccggaagattccggtccgtagatttcgacgatacggcccatcggcagaccacctgccccaagcgcgatatccagactaaggctaccggtagagatggtttccacatccatggaacggtcttcacccaggcgcatgatggagcctttaccaaattgtttctcaatctggcccagtgctgccgccaacgctttctgtttgttttcgtcgatagccatttttactcctgtcatgccgggtaataccggatagtcaatatgttctgttgaagcaattatactgtatgctcatacagtatcaagtgttttgtagaaattgttgccacaaggtctgcaatgcatacgcagtagcctgacgacgcaccgcatcacggtcgccgctgaagcattcccgccgggtaatgccttcaccgcgggcagtggcaaaagcaaaccagacggtgccgacaggcttctcttcactgccgccatccggcccggcgataccactaatagacacggcataatcagcacgagccgctttcagtgcgcctatcgccatttccaccacgacgggttcactcaccgcgccatgctgcgccagcgtctcttcgcgtacgccgatcatctgcgctttggcttcgttactgtaggtgacaaatccgcgttcaaaccaggcggagctaccggcaatatcggtaatcactttcgctacccaaccaccggtacaagactcggcagttgttacggttgcgccacgggctttcagcgcctgcccaacctgttcacttaactgcatcagttcactgtcagtcatcacaacctctgtcagtcaaaaatttatgccggacaagatagcactttcgtcaggaagatggtgttggcgttgcaattttacgaggaggattcagaaaaaagctgattagccagagggaagctcacgcccccctcttgtaaatagttactgtactcgcgccagcgccacggcttgtcctaactgccagaccgccattgcgtaatgggtgctgtggttgtaacgggtgatggtgtagaagttcggcagaccgtaccagtactggtagccggtgccaacatccagacgcagcaggctggcttgttgatggttgcccagcggctgctgtggcgttaaacctgcggcggcaagctggctaatgctgtacttagttttgaagccatttggcaagcctggagcctgaccgtttgccattaccgcgacctgatcgcctttcacccagccgtgcgctttgaaatagttcgccacgctaccgatcgcatcaaccggatcccacaggttgatatgcccgtcgccgctgaaatctaccgcatattgtttgtaagagctcggcataaactgtccgtagcccatcgccccggcaaaggaacctttcagattgagcggatcgtcctgctcgtcgcgcgccatcaacaggaaggtttccagctcgccagagaaatactccgcgcggcgtgggtagttaaaactcagcgttgccagcgcatcgaggatgcgagttttccccatcacgcgcccccagcgggtttcaacgccgataatcccgacgataatttccggcggtactccatacacctgccacgcgcgattcaacgcatcttcatactgattccagaaaaccacaccgttctgcacgttgtccggcgtaataaattttttgcgataacggagccatgcgccgttcggaccacttggcggtttcacgcttgtggttggtgcctggttatccatcagccgcagtacgctatccagacgcttcgcctgggagagaatttcctgcaactgctgacgatcgaaaccgtgtttgttcaccattttgtcgatgaactgctgggcattcgggttattagcgaaatcgccgcccatctgcatcacattgtgctgcggctcaagcaggaagccgccagacggcgttccggtggtcgtatcagtctcagtaggttttggcttgctgctacaggcggcaagcaacacaaaaaggggaagcaatgttacataacgacgcttgaacatgaggggtccatttaacagattcaaccaggggcaagtatggtaaagcatcacgccccgcacaaggaagcggtagtcactgcccgatacggactttacataactcaactcattcccctcgctatccttttattcaaactttcaaattaaaatatttatctttcattttgcgatcaaaataacacttttaaatctttcaatctgattagattaggttgccgtttggtaataaaacaataaatcctgaaggagagaacaatgatagaaaccattactcatggtgcagagtggtttatcgggctgttccaaaagggcggagaggtgtttaccgggatggtgaccggcattcttccgctgttgattagcctgctggttatcatgaacgcactgattaattttatcggtcagcatcgtattgaacgttttgctcaacgttgcgccggtaaccctgtttcccgttacctactgttaccgtgcattggcacgtttgtcttttgcaatccgatgaccctaagcctgggtcgctttatgccggaaaagtacaaacccagctactacgcggcggcctcttatagctgccacagtatgaatggcctcttcccccatatcaaccctggcgaactgtttgtttatcttggcattgccagcggtctgacaacgctgaacctgccacttggcccactggcggtgagttatctgctggttggtctggtcaccaatttcttccgcggctgggtgaccgatctgaccaccgccatttttgagaaaaagatgggcattcaacttgaacaaaaagttcacctggcaggagcaacaagttgaaataacacctggcaggagcaacatcatgacgcatattcggatcgaaaaaggaacgggtggctggggcggcccgcttgagctgaaagccacgccgggaaaaaaaatcgtctatatcaccgccggtacccggcctgcgattgttgacaaactggcacagcttactggctggcaggctattgacggatttaaagaaggtgaacccgcggaggcggaaattggtgtcgcggtaatcgactgtggcggcacattacgctgcggcatctatccgaaacgacgtattcccaccattaatatccacagcacgggcaagtccggtccgctggcgcagtacattgtggaagatatttatgtctctggcgtaaaagaagaaaacatcactgtagtaggtgatgcgacaccacaaccctcttccgtgggccgtgactatgacaccagtaagaaaatcaccgaacaaagcgatggtttactggcgaaggtgggaatgggcatggggtccaccgttgcggtgctgtttcaatctggtcgtgacaccatcgacactgtattaaaaaccattctgccgtttatggcattcgtcagcgcgctcattggcatcattatggcttctggccttggtgactggattgcccacggtcttgctccgctggcgagccatccactgggtctggtcatgctggcgctcatctgttccttcccactgcttagtcctttcctcggcccaggcgcagttatcgcacaggttatcggcgtattgattggcgtgcagattggtctcggcaatattccgccgcatctggctttaccggcactgtttgccatcaacgcgcaggcggcctgcgacttcatcccggtcggtttgagcctggcggaagcccgtcaggacacggttcgcgtcggtgtcccttctgtactggtgagccgctttttaaccggcgcgccgactgtactgatcgcctggtttgtctccggttttatctatcaataaaggctgaaacatgaccgttatttatcagaccaccatcacccgtatcggcgcgagtgccattgacgccctcagtgaccagatgctcatcacctttcgtgaaggcgcgcctgcggacctcgaagagtattgcttcattcattgccacggcgagttgaaaggtgcactccatcccggtttgcaatttagtctcgggcagcatcgctatccggtgaccgctgttggcagcgtggcggaagacaaccttcgcgaactgggtcatgtcaccctgcgcttcgatggtttaaacgaagcggaatttccgggcactgtccatgtggcaggccctgtccccgacgatatcgcgccgggaagcgttttgaagtttgaatctgttaaggagtaaaaaatgaatcaggttgccgttgtcatcggtggtgggcaaaccttaggcgcgttcctgtgccacggtctggctgccgaggggtatcgcgtcgcggttgtcgatattcagagcgacaaagccgcaaatgtggcacaagaaattaacgccgaatatggtgaaagtatggcgtacggttttggtgctgacgccactagcgagcaaagcgttctggcgctctctcgtggggtagatgaaatctttggtcgcgtggatttgctggtctacagcgccggaatagcaaaagcagcctttatcagcgacttccagctcggcgattttgaccgtagcctacaggtgaatctggtgggttatttcctgtgtgcgcgtgaatttagccgtttgatgatccgcgacgggattcaggggcgcattattcagatcaacagcaaatccggcaaagtgggcagcaaacacaactctggctacagcgcagcgaaatttggtggcgtcgggctgactcaaagtctggcgctggatctggcggagtacggcattacggtgcatagtctgatgctcggtaacctgctgaaaagcccgatgttccagagtctgttgccacaatacgcgaccaagctgggtatcaaaccggatcaagtcgagcagtattacatcgacaaagtaccgctcaaacgcggctgcgattatcaagatgtgctgaatatgctgctgttctacgccagtcctaaggcgagctactgcaccggacagagcatcaatgtcaccggcggtcaggtgatgttctgatcaacagcggagatccattaaggatctccgtgagactatagaatgcctgatgcgctacgctcatcaggcatacaggacttccgccactacattaaggaaaagttatggtatccgcactcatcaccgtcgccgttatcgcctggtgtgcgcaactggccttaggcggctggcaaatttctcgttttaaccgtgccttcgacacactatgccagcaagggcgggttggcgtgggccgttccagcgggcgctttaaaccgcgggtcgtggtcgccatcgcgctggacgatcagcagcgcatcgtcgacaccttgtttatgaaaggactgaccgtcttcgcccgaccgcaaaaaattcccgcaattaccggtatgcatgcgggtgatttacagcccgatgtgatctttccccatgatccactaagtcagaatgctctaagtttggcgcttaaactgaaacgtggataatttcgttgtgaatgttacttgcttgcgaagttatcattttgaaacctaaatcaggtaatcacgcccatgaaacctcgtcagcgtcaggccgccattctggagtatctgcaaaagcagggtaaatgcagcgttgaagaattggcgcaatactttgacaccacaggcacaaccattcgcaaagatctggtcattctggaacatgccggaaccgtcattcgtacttatggcggagtggtgttgaataaagaggaatccgatccgcctatcgatcataaaacactcatcaacacccacaagaaagagctgattgcagaagctgccgttagttttatccatgatggcgatagcatcattcttgatgctggcagtaccgttttgcagatggttcccctgctcagccgctttaataacatcacggtgatgaccaacagcctgcatatcgtcaatgcgctatccgaactggataacgaacaaactatcctgatgccaggcggaacgtttcgcaaaaaaagcgccagttttcacgggcaactggcagagaatgccttcgagcatttcaccttcgataaattgtttatgggcaccgacggcatcgatctcaatgcgggcgtaaccacctttaacgaggtttataccgtcagtaaggcaatgtgcaatgccgcgcgcgaagtgattttgatggcggacagtagtaagtttggccgtaaaagccccaacgtagtttgcagtcttgaaagcgtcgataagctgattaccgacgcaggtatcgatccggcgtttcgtcaggcgctggaagagaaagggatcgatgtgatcataaccggagagagcaatgagtgaagcactactgaacgcgggacgtcagacgttaatgctggagttgcaggaagcaagccgtttaccggaacgtctgggcgatgattttgttcgcgccgccaatatcatcctgcactgtgaaggcaaagtggtggttagcggaattggcaaaagcggccacattggtaagaaaatcgccgcaacgcttgccagtaccggcactccggctttttttgtccatccggcagaagcgctgcacggcgatctggggatgatcgaaagccgcgatgtgatgctgtttatctcttactccggtggcgcgaaggaactggatctgattattccgcgtctggaagataaatctatcgcgctgctggcgatgaccggcaaaccgacgagtccgctgggcctggcggcaaaagcggtgctggatatctccgtagaacgcgaagcctgcccgatgcaccttgcgccgacctccagcaccgtcaataccctgatgatgggtgacgcgctggcgatggcggtcatgcaggcgcgcggatttaatgaagaagattttgcccgctcccacccagccggggcactgggcgctcgcttgctgaataaagtgcatcatctgatgcgccgtgacgatgccatcccacaggtggcgttaaccgccagcgtgatggatgcgatgctggaactcagccgcaccggtctggggctggtggcggtatgtgacgctcaacaacaggtacaaggcgtctttaccgacggcgatttacgtcgctggctggttggcggcggcgcactcaccacgccagtcaatgaagcgatgacggtcggcggcaccacgttgcaaagccaaagtcgcgccatcgacgccaaagagatcctgatgaagcgcaaaatcactgccgcaccggtggtggatgaaaacggcaaactcaccggcgcaataaacctgcaggatttctatcaggccgggattatttaatccttcaatcccagacgtttcgccagccgatgcaggttggcgacgtcggtttccagcatccgcgcgcaggcagcccagttgtgatgattttgtgccagtgcctgacgaatagtttcacgctggaacgcttctgtcgcttcacgcaggttttgcttaacaacgggcaccgccgccacttctggcgtcggcaacgtcacctcaggaaaagcaaaatgttgcgcctcaagaatcacttcatcgccgctgcgggtggctctcgccagaactaccgcccgatgaatagcatgttccagttcgcgcacgtttcccggaaaactgtagtgttgcagtaaatttcgcgctccggcacttaataccacgcgggagagcccctgccgcaaacgacactgctcgcagaaataccccgccagcagaatgacatcatcgccccgctcacgcagcggcggcacgctaagtggaaacacgctcaggcgatgaaacaaatcggcgcggaatcgccctgccagcacctcttcgcgtaaatcgcggttagtcgccgccagcacgcgcacatcgacccgcaaacaacggtcatcgccaacgcgctgaatatcgccatactgcaacaccctcagcagcttggcctgcaatgccaagctcaactcgccgatctcatccagaaacagcgtgccgttatccgccatttcaaacttcccgctgcgattactgatagcgccagtaaacgctcctttcacatgcccgaacaactcactttccgccacactttccggcagtgcagcacagttgagatagaccagcggattcaccgcccgtgggctggcttcatgaatcgctttcgccaccagctccttaccggttccagtctcaccgctgatcaggacgttgagatcggacgccgccacaatctcaatctcttttttcagttgcgtcatgccaggggacaagccaatcatctgcgtctgtttcaccgcttcaaacggcgtggcatcgcctggcagcatattctggctttccagttgttcaatcagcaacgcattgcttaacgctcccgccgccagcgcagcaatcagccgtagctcttcgtcgctgaaaacatcgaactgatcgggctgcatcccgtcgagcgtcagtgcgccgatcaggttttgcccggcaaacaatggcagaccaacgcaggcgtgaaccttcagactctcctgcccaggaatcaaaccgtcatagggatcgggcaattcgctgtctgcgggaaagcgcaccacatccccggcgcgggcaatcgcttccagccgtggatgcccttccagcgcaaagcgtctaccgagtacatcctttgccagaccgtcgatggcaagcggaataaactgccggctatcgtaacgtagcaacgcagacgcatcgcactccagcacctgacgtagcgtggtgatcaggcgctgaaaacgatcctggtgaccaatcccacgctgcaattcgatggcgatattcgccagcacatcaacggaaaaactcatctttgcctcactgtcaatttgactatagatattgtcatatcgaccatttgattgatagtcattttgactactcattaatgggcataattttatttatagagtaaaaacaatcagataaaaaactggcacgcaatctgcaattagcaagacatctttttagaacacgctgaataaattgaggttgctatgtctattgtggtgaaaaataacattcattgggttggtcaacgtgactgggaagtgcgtgattttcacggcacggaatataaaacgctgcgcggcagcagctacaatagctacctcatccgcgaagaaaaaaacgtgctgatcgacaccgtcgaccataaattcagccgcgaatttgtgcagaacctgcgtaatgaaatcgatctggcggatatcgattacatcgtgattaaccatgcagaagaggaccacgctggggcgctgaccgaactgatggcacaaattcccgatacgccgatctactgtacagccaacgctatcgacagcataaatggtcatcaccatcatccggagtggaattttaatgtggtgaaaactggcgacacgctggatatcggcaacggcaaacagctcatttttgtcgaaacaccaatgctgcactggccggacagcatgatgacttacctgacaggcgacgcggtgctgttcagtaacgatgctttcggtcaacactactgcgacgagcatctgttcaacgatgaagtggatcagacggagcttttcgagcagtgccagcgttactacgccaatatcctgacgccgttcagccgcctggtaacaccgaaaattaccgagatcctgggctttaacttaccagtcgatatgatagccacttcccacggcgtggtatggcgcgataacccgacgcaaattgtcgagctgtacctgaaatgggcggctgattatcaggaagacagaatcaccattttctacgacaccatgagcaataacacccgcatgatggctgacgctatcgcccaggggattgcggaaaccgacccacgcgtggcggtgaaaattttcaacgtcgcccgaagcgataaaaacgaaatcctgactaatgtcttccgcagtaaaggcgtgctggtcggcactagcacgatgaataacgtgatgatgccgaaaatcgccgggctggtggaggagatgactggtttacgcttccgtaacaaacgcgccagtgctttcggctctcacggctggagcggcggtgcggtggatcgtctttccacgcgcctgcaggatgcgggtttcgaaatgagccttagcctgaaagcgaaatggcgaccagaccaggacgctctgaagttatgccgtgaacacggtcgcgaaatcgcccgtcagtgggcgctcgcgccgctgccgcagagcacggtgaatacggtagttaaagaagaaacctctgccaccacgacggctgacctcggcccacggatgcagtgcagcgtctgccagtggatttacgatccggcaaaaggcgagccaatgcaggacgttgcgccaggaacgccgtggagtgaagtcccggataacttcctctgcccggaatgctccctcggcaaagacgtctttgaagaactggcaagcgaggcaaaatgagtaacggcattgtgatcatcggtagcggcttcgccgcccgccaactggtgaaaaatattcgcaaacaggacgccactattccattaaccctgattgccgccgacagcatggatgagtacaacaaacctgacctcagccatgttatcagtcaggggcaacgtgccgatgaccttacccgccagacggcgggtgaatttgccgagcagtttaatctgcacctgtttccacaaacctgggtgacggatatcgatgccgaagcccgtgtggtgaaaagccagaataatcagtggcaatacgacaagctagtactggcaaccggtgccagtgcctttgtcccgcctgtgcctgggcgtgagttaatgctgacgttaaatagtcagcaagagtatcgcgcctgtgaaacgcaactgcgggatgcccgacgcgtgttgattgttggcggtggtttgattggtagcgaactggcgatggatttttgtcgtgcaggcaaagcggtcacgctaatcgacaacgctgccagtattctggcgagcttaatgccaccggaagtaagcagccgcttgcagcatcggttgacggagatgggcgttcatctgctgttgaaatctcagttacaggggctggaaaaaacggattctggcattcaggcaacgctggaccgccagcgcaatatcgaagtggatgcggtaattgccgccaccggactgcgcccggaaaccgccctggcacgacgcgccgggctgacgattaatcgcggcgtttgcgtcgatagttatctgcaaaccagtaataccgatatttacgcgctgggcgattgcgcggaaattaacggtcaggtattgccgttcctccagccgattcaacttagcgcgatggtgctggcaaaaaatcttctcggcaataacacgccgctgaaactcccggcgatgctggtgaaaatcaaaacgccggaattaccgctgcatctggcaggcgaaacccagcgtcaggatttacgctggcaaattaataccgaacgccagggaatggtggcgcgcggcgttgacgatgctgaccagcttcgcgcctttgtggtcagtgaggatcggatgaaagaggcatttggattgttgaaaacattgccgatgtaagtgggctactgtgcctaaaatgtcggatgcgacgctggcgcgtcttatccgacctacggggacgcatgtgtaggccggataaggcgtttacgccgcatccggcaatggtgtccaaatgcaacacgttttatccgttctggacttcacccgctaaccaacgcgccgcagcaataaccccctgccccagagacaaaccgccatcacccgccggtaaactctgtggaaagagcaatgtgaaatcagcgagataatgcgccagacgtgcacgcagcaaacggttatgaataaccccgccgctaaataccagcgtagtgataccacgcatcgtggcctgctcacgcatcaacgcggcaaaaccctgcgccagcgcatcatgaaacgcccacgcgcgttgattaaccggtgcctgccagttcagccactgctgccagaaagtggcgagatccagttgattgtccacccgcggcattgtcaccggatgcgtcactccgtggcaactggctgcgagcgcctccagagcacaagccgcttcaccttcataacttaacgtggctggcgcacagcccagtgccgccgccactgcatcgaaaaaacgcccacagctactcgccagcggcgcgttaattccacgctcaatggcccgcgccagcacgctccagttttgctgttgcacacttgctgtttcagagtaattctgccactccggcacaaagcgcaggcactgcgccagcaggtttcgccacggctgcttcgctgccaaatcgccacccggaagcgccactgcaggcaagccgcccaggtgctcacattcgcgatagttcacccgcaggcactcgccgccccacaaagcgccgttctcccccataccgataccgtcgagcgtcaaagcaatgacatcaccgccatccagcggccactgatgctctgccagacacgccgctgcatgggcatgatgatgcagtaccgtttgcgtcggcagattcatttcacgcgcccactggctggagacatagcccggatgcgcgtcatgcacaacgtattgcggggtaaaatcgtagatgttttgcatcaggcgtaacgcttcgcgccactgcatctggatgccatcgtcacttaaatcgcccagatgctgactcaacaccgcttgttcaccgcgcaccaggcagaaggtatttttcagatccgcgccgagacacagcacaggcggaacatttttaaagcccggaggcaaagccagcgcatccggcacatacccccggctacggcgcagcatttcgccgctttcgcgcaccacgctatcatccatccgctgcacgatgtcgcggttatgtatcaagaatccgtcggcaatgccctgcaaatccgccagcgcctgttcgttgctgatagctggtggtttaccgctcaggttgccggaggtcatcaccagcgggcattgcagttcctgtaacagcaaatgctggagcgggttcgcaggcaacattaccccgacttcgttaaggtcaggggcgatatcatcacaaagctcaggaacgtattttttatccaccagcacaatcggcgcggcgggcgtggtaagcaactggcgcgcagcgtctggtaaaccgtcagccactggcaacatgaccgccagcggtttcgccgggcgatgtttgcgcgcccgaagtgtcgccaccgcgttactgttacgtgcatcgcaggcaagatgaaatccgccaatccctttgatggcgacaattttgcccatttttaactgtgcgatagctgcctgtaatgccgcctcttgttccgcatgttcaccatgacttacccattcaagatgcgggccacactccgggcaggccaccggctgggcgtggaagcgacgatcgagcgggtcacggtactctttgtcacaggccggacatagcggaaacgccgccatcacggtaaacgggcggtcgtaaggcatggcgcgaataatggtgaaacgcgggccgcagtgggtacagttgataaacggataacgataacgccgttcgcctggggtattcatttcggcaaggcaagcagggcaagtagcggcatcgggaacaatttgcgtattcatggtgccgcctgtgctctggcgtatagtgaactcggtgggcagttgactccagataaacggctcacgctcgacgctatcaatacgcgccagcggcgggcagtgctgatacaattgaacaagaaacgtttccgggtcttcccgcagccggacttctacgccatcgccgtcattacagacatcgccgtgaagatttaattgctgtgccagctgccagacaaacggacgaaaaccgacgccctgcactttgccacgaatacgcagttggacaccgcaagatgtgttttttgccattgagttattcccgccatcatgaattgcgtaacccgccctgccggacacgacagcgtcgcatccggcagtcacaggtcggcgataccgcccgctccgtattctacgaatatttccgggaattcctttgatgccagaacagttctgtaagatttttagaacatcagcgccgtacggcggcgtttttctgcgctcagttgttcaagtttattacgatcgacacaaatcagcgcatgagtcgggcaagccgccatacacgccgggccgtcttcacgatggttgcacaggtcgcatttattggcttcggctttgtcagcccgtacattcagacccgcgccgctgttgcggatcaccggacgtaccaccacttccatcgcaccatacgggcaagccacaacgcaggttttgcaaccaatgcaacgttcctgcatcacatgaacaaaccctttatcacggctgatagcaccattcgggcagacgttagcgcacggtgcatcttcacactgacggcaaactgtcgccgtggaaatgttcacacctttaatgacatggatacgcggtaaaaaagtttccggggtcaggcttgcacagtcctgattttcctgatgagaaaccacgcacgctacttcacaggtacggcaaccaatacatttactcgcgtcagcaatgatgaaacggttcatcaaattctccagcaatgacagttaatgcgccgatacattcacaaatcatgccagtttttaatttactgttatttaaggaaattaatttctgtaatgcaggaaaaacgatgtcatcgacactagtgacgatgacatgtgatgacaatgtttatcggctaggagcaatgagactgtcgcggcggatcagttttccgctgaaggttttcggcggactgaaatccccgccatcgagcataaaaatcagccgtccaataatttcctgaatcatctcagtcaccggaatttttacgctggagagcgccggaacggtgtagggggcaatagcgatatcatcgaatccgataacactcacctgctctggcaccgctacgccgcgctcgtgtaacgctttcatcgcacctatcgccatatcgtcgttactggcaactaacgcgctaaatttagccccacgttcgagcaacatttctaccccttcggccccgctggcaggcgtccatttaccgttagcgataagtttttcattgagcgcaataccatgctgcgccagcgcgtctttatacccggcaagacgttcaatgctggtgggggaatccatgctgccggtaaggaaagcaatctcctgatgcccggcgtttatcaactctgccacggcgttaaaactggtctgtttatgatcgcaccagacgctatggctgctgtttttgcgcaggcggcgattaagcaccattatcggctgactgtgcgcgtcaatgatgtcatcgatctcatccacgcttaaaaaacgcgggtaaatcatgatcgcgtcgcagcgcagatccagcagatactgaatcgcctggcgctcttcttctgcgctgtgtttaccatctgccaatagcaactgccgccctttctcttccgccattcgcgcggcatgaaagagtaattcactaaaataaatgccgtggtaaagcgtgttggtcactaccagccccagcgtctgagtactcttcgcgctcagattgcgcgccagcaagtttggacggtaaccgctctcttctaccgcctgaaacacgcgatctttagtctcctggctgacgtagccattaccactaagcacgcgggaaacggtcgctttactaaccccggcgcgcttcgccacttccagcatcgtcgtcatcattttcatccctttacacgcaatcaacgcagtgtactgcaccgtttgccgattgtccttgcacaatcggcgggaaaaatattcaggtgaccggtttcacaaatataaaaaatgaacaattcactctcttgcttatttagtgacaactattcatgattttgtgaaaccggtttcttaattccgtttcagcatcggcatttttccgtcacgtcgactgataacaactacatctaccctactgataacaggataaaatccgatggccaaaaattatgcggcgctggcacgcagcgtgatagcggcactgggcggcgttgataacatcagcgcggtcacgcactgtatgacgcggttgcgctttgttatcaaagatgatgcacttatcgacagcccgacgttaaaaaccatccccggcgtgctcggcgtggtacgtagtgacaaccagtgtcaggtgattatcggcaataccgttagtcaagcctttcaggaagtcgtcagcctgctgccgggagatatgcagcccgcacagcccgtgggtaaacccaaactcacgctacgtcgcattggtgcggggatcctcgatgcgctgatcggcaccatgagtccgctgatcccggcgattatcggcggaagcatggtcaaactgctggcaatgatcctcgagatgagcggcgtgctgacaaaaggaagcccgaccttaaccattctgaatgtgattggtgacggtgctttcttcttcctgccgctgatggtcgcggcatctgccgccatcaaatttaaaaccaatatgagcctggcgattgccatcgcgggtgtgctggtacatccgagttttattgaactgatggcgaaagcggcccagggtgaacatgtcgaatttgccctgattccggtcaccgcggtgaaatacacctacacggtgatcccggcgctggtgatgacctggtgcctgagttatatcgaacgctgggtggacagcattacaccggcggtgaccaaaaacttcctcaaaccaatgctgattgtgttgattgccgcaccgctggcaatcctgctgattggcccgattggtatctggatcggtagcgccattagcgcgctggtttacaccattcatggttatctgggctggcttagtgtcgccattatgggcgcgctgtggcctctgctggtaatgaccgggatgcaccgcgtctttacgccaaccatcattcagaccattgccgaaaccggcaaagaagggatggtcatgccgagtgagatcggcgctaacctgagcctgggcggtagtagtctggcagtggcgtggaaaacgaaaaacccggaactgcgtcagacggcgctggctgcggcggcaagtgccattatggcggggatttccgaaccggcgttatatggcgtggcgatccgcctgaaacgtccgcttatcgccagtcttatcagcggttttatttgcggcgcggttgccggtatggcggggcttgccagccacagtatggcagcgccggggctatttaccagcgtgcagttcttcgatccggcgaatccaatgagcatcgtctgggtgttcgcggtcatggcgctggcggtggtgctgagctttatcctcacactgttgctcggctttgaggatattcctgttgaggaagcggctgcccaggcgcgaaagtatcagagcgtacaaccgaccgtcgccaaagaagtaagtcttaattgaggatgaaaatgagtgtatttccagaaagttttttatggggcggcgcgcttgccgccaaccagtctgaaggtgcgttccgtgaaggtgacaaaggtctgaccactgtcgatatgatcccacacggcgagcatcgaatggcggtgaaactggggctggaaaaacgttttcagttgcgagatgacgagttttatcccagccatgaggcgacggatttttatcatcgttataaagaagatatcgccctgatggcagagatgggattcaaggttttccgtaccagtattgcctggagccgtctctttccgcagggcgatgaaatcacgcccaatcagcagggcattgctttttatcgttctgtctttgaagagtgtaaaaagtacggtatcgaaccgctggtcacgttgtgccacttcgatgtgccgatgcatctggtcaccgaatatggctcctggcgtaaccgcaagctggtggagtttttcagccgctacgccagaacctgctttgaagcatttgatggtctggtgaaatactggctaaccttcaatgaaatcaacattatgttgcatagcccgttctccggcgcgggtctggtgtttgaagaaggtgaaaatcaggatcaggtgaaatatcaggccgcgcatcaccagctggttgccagtgcgctagccaccaaaatcgcccatgaggttaacccgcaaaatcaggtgggctgtatgctggcgggcggtaacttctacccttacagttgcaagccggaagatgtctgggcggcgctggagaaagaccgggaaaacctgttttttatcgatgtgcaggcgcggggcacgtatccggcttactctgcccgcgtattccgcgaaaaaggggtaaccatcaacaaagcaccgggcgatgatgaaatcctgaaaaacaccgtcgattttgtctctttcagctattacgccagccgctgcgccagcgcggagatgaacgccaacaacagcagtgcggcgaacgtggtgaaaagcctgcgtaatccgtatctacaggtgagcgactggggctggggaattgatccactcggtctgcgtatcaccatgaatatgatgtacgatcgttatcagaagccgctgtttctggtggaaaacggcctgggcgcaaaagatgaatttgctgccaatggcgagattaacgacgactatcgcatcagctacttacgcgaacatatccgcgcaatgggcgaagcgattgcagacggcattccgctgatgggctacaccacatggggctgtattgatttagtttccgcctctacgggtgaaatgagcaaacgctacggctttgtctttgttgaccgtgacgacgcaggcaacggtacgctgacgcgcacgcgtaagaaaagtttctggtggtataaaaaagtgattgccagtaatggggaagatttagagtaagtaacagtgccggatgcggcgtgaacgccttatccggcctacatgtcgcacgaaccatgaaggcccgataagcgcagcgcatcgggcaatttagcatttggcatcagagctggttcaccccatcaagaacatccctgtcctgattccttaatgaaaaattactcttcttccaccgctaactgcgcgaagccgccatttccttcccagccttccagtcgttgataaacggtttctaccgcatctttaatcggctgggtcatcgggtagtaaaagccgacgatatccggctgaatgccgaggaaaatcacttcgccaatatcttctttcaactggtcgataaggtaattcaacggcatgttatgggtagtcatcataaacatctcggcgatatcatccgggtcgatgatgcggatctcgccggggtttagccccatatccgtggcgtcgacaatcagcagtcgtgtcgggcgcagttcacggatagcgacgatgtcgttttccggtgcgctaccgccgtcaatcaccacccagttacctttcggcgcggcggcgcacttttccgccagcagcggacctgcgccatcatcgcccatcatgctattgccaacacagagtaaaacgtcagtcacgcagtctcctcaccatcaaatagatggcgttttcctgatgaatatcatgcagcatacttaacagcattgtactccattcctgctgctggctagtttgcgctgcccgggctttatcgaatgcgttggccagcatcggcacatggttaatgtcgatgacgatctcaccatatttcggcacgccttccattttgcggcgggcttcactgcctgcctccagagtggcaatccatgccagatattcatcccacgggcaggtgagcgccgcttccaggcaatcgataaccccaaggtggtgaccaatcgccaggctgtaatagaccacctgctgcgcctcggcgggcgtggcatcgttctcatcaataaatttatggctcagttgactgaacaccaccttttcactcatcggatacgcgcctcttcaacaacatgattcagatggctgacaatctcgttcagacgcggatcgttttccgcttccagccagcgtgcaacctgttcttcgccctgccctaactgtgtaaggtaatcatcggcaatctgacgaccgtaacgataacccgccaggcgacgtgcttcgcgatccactttcacgcgcagcggctgcaccatatcaccatgcaggatctccgccggttgttcatccagttcacccggcccacgggcgtgaattttctgctccagcaggccgagcgccattgcaaagccgtacagcgtggcggcaggcgttggcgggcagccagggatataaacatccacagggacaattttatccgtaccgccccacacgcagtagagatcgtggaagatcccgccactgttaccgcaggcaccgtaggagatacaaattttcgggtccggcgcggactgccacgcacgcagcgcaggggatcgcattgcacgggtgaccgcgccggtaaacagtaaaatatccgcatgacgcggactaggaacgactttaatgccgaagcgttctgcatcaaacagcgggctaagcgtggcgaaaatttcgatttcgcaaccgttgcagccgccgcagtccacgcggtaaacataggcagaacgtttgatttttttcagtaagctcgccttcatgctggcgatggattcatccaccgtcatggggaccggaatgccgttggcgtcacgggggcctaataaattgctcatcagatggcctctttcatatggcgagtcagttcaatacggtcggacggcaccaggcatttctggcgcttacattccgggcaagtctcaaagctttcgcggtggttttccgcgcggctgtcgccgttgtgcttaagcagcgcaatggcgtagtcgatctctttctggacggcgaaaggacgattgcagacgcggcagttgcacagcgcgaagcgggactgttgcaggaagtcttctttcttccacaccgccagttcgtactcttggctcagtttgatcgccgccgtcgggcagacttcttcgcagcgtccacagaagatgcagtgcccaagattaaactcccaggcaagctctcctgtggcgaggtcagtttcaaccgttaaggcgttactcgggcaggcattgacgcaggccgcgcagccgatgcactgctgcgggttctgctctggcttaccacggaagtttttatcaaccgcaatcggctccagcggataagagctggtcgccgtgccggttttgatgacttttttgataaaggtaaacatggcgattccttatttcagcgggctgtttttacgctcaatgctgtaacgctcgagttctttgtacggcaccactttgctcttcttcttacgcacatcgaccacggtcatgcggtcggtacaggagtagcaagggtcgaggctaccgataatcagcggcgcatcggaaacggtgttgccgcgcagcatgtagcgcagggtcggccagttcgcgtaggtcgcggcacggcagcgccagcggtacagcttctggttgtcgccggtcatgctccagtggatatcatcgccgcgcggcgcttcggcaaagcccagcgcaaagcggtgcggaatgtaggtaaagccttccaccatcagtgggccacccggcaggttatccagaccgtagtcgatcatgttcagcgcggtatagacttcgttgatacgcactttcagacgggaaataacgtcgcagccctgctcgctgtggacttccattggcagcaggccatagccgacaaacgggtgatcggcgcgggtatcacgggcgtgaccgctggcacggaccatcgggccgacgttactgaagtcgcgagcgatttccgggtccagacgaccaatgccgacagtgcgctgttccatgttcggagtgctcagcagcacatccaccagctcctgcacttcacgacgcatctgttgtgccagctggcgggtctggatcatgtcgtctttcagcagatcgcgacgaatcccgccgatcaagttcaggccgtaggttttacgcgcaccggtaaggatctctgccattttcatggaggtttcacgcacgcggaagaactgcataaagccggagtcgaagccggtaaagtgacaggccaggccaaggttgagcagatggctgtgcaagcgttctacctccagcagaatggcgcggatcatctgcgcacgttctggcacctgaatacccatcgcgttttccacgctcgtggtgtaggcggtgctgtgggcaaagccgcagatcccgcacacacggtcagagaggaaggtcacttcgttataacccatacgggtttccgccagtttttccatgccgcgatggacgtagaacagacggtagtcggcgtcgataatgttttcgccatcgacgaacagacggaagtggcccggttcatcagaagtgacgtgcagcggaccaatcggcacgacgttgtttttcttgtcgcccagttcgttgatgaactcgtaggtttcagcatcggtggtcggtgccggacgctgacgataatccatgctgtctttacgcagcggataaagttcatccggccagtcatccggcagcaccagacgacgttcatccggcagaccaaccggaatcaaaccgtacatatcgcgcacttcacgctcgccccacaccgccgccggaacgcgcggcgtcacggacggatattccggtttgttggcgtcaacttcgacgcgaaccgtaatccaacacttagtgcccttctccatgctcagcacgtagtaaacggcgtaatgaccattcagtttgcgttcgtcgttaccaaacagcacgctcagccagccaccctgtttgtagtaaagaaactccaccacttccggcaggtagttcacctttacggtgacagtcagctgatctttggtctgccaggcgtggtccagcacgacgcccggaaatgcctcattcagcgcggcgagataatgttgacctaatttttcttcagacatgctcaaactctctttaatcacgccgccagcaaggagacgaacgctaaaaatgcaaagccaaacccagcccaggtaatgcgcggagtaatatcaagacgcagacgggccatgctgttttcgaacagcgcgataaccaggacgccgaccaccagttttacgatggcaatcaccagcgccagcagcagtccaccggcggtgaaggtttccatttgtccccacggaataaacaccccgacgaacatctgcaacaccaccagctgtttcaggctgataccccatttcatgacgccaaagccgctgccgctgtattcagagagcgggccttcctgcagctcctgctcggcttccgccaggtcgaacggcagtttgcccatttcgataaaggtggcgaacgcacaggcacaaagcgccagtaccagcgggatgctctggctcagcggccagtgataaacggtgtcggtgatgttgctgatgttggtggaaccggcaacctgtgcggcaacccacagaccaagcagcagcatcggttcgaccagcacgccaagcatcgcttcacggctcgcgccgatagcggtaaacgggctaccggtatccagaccagaaatggcaaagaagaaacgcgcgatggcaaagagatacagtaaggtgatcaaatcacccagttgcggcagcggagaaccgacggtcaccaccggcagcgcagtagcgatagtcagcatgacgcccaccatcacatacggcgtcaggcggaacacccagccggaggcatccgggccgacgctctgacgccccagcagtttgataatgtcgcgatactcctgcaacacgcccggcccgcgacggttatgcaagcgggcgcgcgccacgcgggttataccggagagcagcggcgcaacggcaaataacaccagcgcctgaattaacggatataaaacactcattctcaggctcctcgactaacaataatcaccaccagtaccgccagttcaaccagcgccatccggcggaacagcaacgcactcccctcgcactgccagcccggcaccagagacaccggattcagccatttgcgtagtttcagcaccggcgcaaacgcctgtttcaccggcatggcaaaaccgtgagcggtaatcaccatacttttttcgtggtcgtaaccgcacacccaggccgcaccgcgggaacggcttggcaaacgatcgcctttgcaaatcgccataatgatgaatggcagcagcgggcaggcaatcagcagcaacgtgatcatcggttgagaaacggtggtgttagcaggctccagcggcagaggtacagcagcagagagcatcggcagtagccacggcgcagcaacaccgccaattacgcagcaaatcgccagtgccactacgcttacgctcatcaggagcggcgcacaggtggcgttttcggcttctttggtgcgcggcgcgccgaggaacgtgacgccatagactttcgccatacacatcaccgccagcgcaccggtaattgccagccccacagcgagcagcggccccagcagacgggcaacaaacgcgccactattgctcagtttgaaaaaactttgatagataacccattccccggcaaaaccattcagcggcggcagcgcagccattgccatcagcccgactaacatggcgatggagataaccggcattttcttgccaataccaccgagtttttcgatatcgcgatgaccggtacggaaccagacgctccccgccccgaggaacagtacgcttttgaacaggctatggttaagcagatggtacagaccaccgaccaggccaagagcaatcagcgccggttgttcgagcgcgatacccgttacgccagcgcccagccccagcaggatgatgccgatattttccagggtgtggtaagccagcaggcgctggatgttgtgctccaccagcgcatacagaccaccgacaaacgcggtgatcatgccgagcaccagcagcgcgatcccccaccacagcggtgcattaccgcccagcagactcagggttaaaatgcccagcaggccaattttcatgactaccgtagaaaacaacgcggcagctggcgcagaggcgttcgcatgtgcctgcggcacccagccgtgcagcggaataatcccggccagcaggccaaagccaatcactccgagcagccagatatcggaaccgagcggcagctgttgcatacgcatatccagcaggcgcagatccagcgtgccgtaacgctgccacagcagccagcaagcaatcgccagcagcagagtgccaagacgccccagcgcaaaccacagtttgccctctttgctgttgctggtgaggaacaccgcgcacagggccatgatttcggccattaccacgaacatgccgaggttgctggcaatgacggcgcagacggcggcagccatcaacatattgatctgcaagccgttgcacttcacctgcgcgtggcgatgccagtcaatgttgtagaggctgacaaacagaccgcacagaccgagcgtaatcagccaaatcgcgttaagcggagagatttgcacatcgtagcttaccaggctcagcgcaccgctcacgccaaccgcgccagtcagtacagtgaagcccgcggctgccgtatacagactaccaaccgcgccgccaattccagctatccagccacttaacgctttttgaaaagaaaagagaaatgccagaacagcggcggcgacaaaccacgccacgccgctattgatcagggaaattgcgctcatttagcctctccactttgagcctgctgaaacaaggtgagatcgccaaagtccgtgttaaaggtcagctcacgcttacgtttgctgacgcgggcgatatcggtgttatccaccagatgcagggctttagtcgggcacatccgcacgcaggccggaccttgttcatcaaagctacaaaggtcacatttgacggcgatcgcgcgaatacctggcacccagtcaagcaatgtgctgacacgcgccggagcaggcggtgccggtggcgctttcggggtattggcgtttgccggaatatccagcggacggctgccggaaaattcaattgcgccaaacgggcaggcgatgccgcacagcttgcagcttacgcacaggctttcattcaactgcacggccccatcgacgcgggtgatggcgttaaccgggcagaccaccgcgcagggtgcatcttcacagtggtgacagagctgcggcgcagattctttttcattcagcatcactctcaggcgcggcatactttgcaggccgtgctggcgatgcgtctcactacaggcggcctcacaagtgtggcagccgatacagagcgtggagtcagcaattacaaaacgattcaccaggcattcctcaggtgattgtcatttttgacgaaaacatgccgatgaaatgtcattttcgacactcatcgacacgcccatccccaaacaggcgtaacgcctgcaaaacgggcaaagcctcagctcatgctgccgggctttgtccctttaccagttggcttaaattcaccggcacattgttttcaatagcggtgtataagctgtcgtaaacgccagcgattttttcgagatagtgttccagaacctgttcgcgatcgcggatgttgaccttgccatcaatcatgccgtcaatgctcagttgcgcctgcgcaatccgctgtttgtcttcgccatcttttgtttcgacgtaatactcgatggtgtggctgttaaagccatccgccagggtgacgtaaatgcgaaaatgttcaaaaaggacgaaacagagttctttgtccggcgcgcagctcatggcgtgatgcaggcgcgctttgcttaacgtgatcccctgaaccaggctattgcagtagatgtgccactggtcctgtaggcgacgatgccgctgtgcgatgtaatcggctttctcgcttatttcccaaatagtcattgtcaggttacccgtttaacagagatgccagctttaagcattttttgtgccaacttttaatttattgttattaaagagatttttaagctaaagatgaatttcgtcgccgtgtcgacgtgtcatttcgacatcatcgacattattcaccgcagggataatcaacactggcacaattattgcttgtagctggcaatagttaatgggaggcgatatgcacgaaataaccctctgccaacgggcactggaattgatcgaacagcaggccgcaaaacacggcgcaaaacgcgtaactggggtctggctcaaaattggcgcattttcttgtgtcgaaaccagctctcttgccttttgttttgatctggtttgccgcggcagcgtggcggaaggttgtaaactgcacctcgaagaacaagaggccgaatgctggtgtgaaacatgccaacagtatgtgacgctactgacccagcgcgtccgccgctgtccacagtgtcatggtgacatgctgcagattgtggcagacgacggtttacagattcggcggatagaaatagaccaggagtgagcgatgtgtacaacatgcggttgcggtgaaggcaacctgtatatcgagggtgatgaacataaccctcattccgcgtttcgtagcgcgccatttgccccggcggcacgcccgaagatgaaaatcaccggcattaaagcgcctgaatttacccccagccagactgaagaaggcgacctgcattacggtcatggcgaagcgggcactcacgcaccgggcatgagccagcgtcggatgctggaagtcgaaattgacgtgctggacaaaaataaccgtctggctgaacgcaaccgcgcgcgctttgctgcccgcaagcaactggtgctcaacctggtttccagccctggttccggtaaaaccaccctgctgacggaaaccctaatgcgcctgaaagacagcgttccgtgcgcagttattgaaggcgaccagcaaaccgtgaacgatgccgcacgcattcgcgctaccggcacaccagcgattcaggtgaacaccggtaaaggctgccatcttgacgcacagatgattgccgacgccgcaccgcgtctgccactggacgataacggtattctgtttatcgaaaacgttggcaacctcgtatgcccggccagcttcgatctcggtgaaaaacacaaagtggcggtgctttccgttaccgaaggtgaagacaaaccactgaaatatccgcatatgtttgccgccgccagcctgatgctgctcaacaaagttgacctgttgccgtatctcaactttgacgttgaaaagtgcatcgcctgcgcccgcgaagtcaatccagaaattgaaatcatccttatttccgccaccagcggcgaagggatggaccagtggctgaactggctggagacacagcgatgtgcataaggtaaaactggctggagacacagcgatgtgcataggcgttcccggccagatccgcaccattgacggcaaccaggcgaaagtcgacgtctgcggcattcagcgcgatgtcgatttaacgttagtcggcagctgcgatgaaaacggtcagccgcgcgtgggccagtgggtactggtacacgttggctttgccatgagcgtaattaatgaagccgaagcacgcgacactctcgacgccttacaaaacatgtttgacgttgagccggatgtcggcgcgctgttgtatggcgaggaaaaataatgcgttttgttgatgaatatcgcgcgccggaacaggtgatgcagttaattgagcatctgcgcgaacgtgctagtcatctctcttacaccgccgaacgccctctgcggattatggaagtgtgtggcggtcatacccacgctatctttaaattcggcctcgaccagttactgccggaaaacgttgagtttatccacggtccggggtgcccggtgtgcgtactgccgatgggtagaatcgacacctgcgtggagattgccagccatccggaagtcatcttctgtacctttggcgacgccatgcgcgtgccggggaaacagggaagcctgttgcaggcaaaagcacgcggtgccgatgtgcgcatcgtttacagcccgatggatgcgttgaaactggcgcaggagaatccaacccgcaaagtggtgttcttcggcttaggttttgaaaccactatgccgaccaccgctatcactctgcaacaggcgaaagcgcgtgatgtgcagaatttttacttcttctgccagcacattacgcttatcccgacgttgcgcagtttgctggaacagccggataacggtatcgatgcgttcctcgcgccgggtcacgtcagtatggttatcggcaccgacgcctataattttatcgccagcgattttcatcgtccgctggtggttgctggattcgaaccccttgatctactacaaggcgtggtcatgctggtgcagcagaaaatagcggcccacagcaaggtagagaatcagtatcgtcgagtggtaccggatgccggtaacctgctggcgcaacaggcgattgccgatgtgttctgtgtcaacggcgacagcgaatggcgcggcttaggcgtgattgaatcttctggcgtgcacctgacgccggattatcaacgattcgatgccgaagcacatttccgcccggcaccgcagcaggtctgcgatgacccgcgcgcgcgttgtggtgaggtattaacgggcaaatgtaagccgcatcaatgcccgctgtttggtaacacctgtaatcctcaaaccgcgtttggtgcgctgatggtttcctccgaaggagcgtgcgccgcgtggtatcagtatcgtcagcaggagagtgaagcgtgaataatatccaactcgcccacggtagcggcggccaggcgatgcagcaattaatcaacagcctgtttatggaagcctttgccaacccgtggctggcagagcaggaagatcaggcacgtcttgatctggcgcagctggtagcggaaggcgaccgtctggcgttctccaccgacagttacgttattgacccgctgttcttccctggcggtaatatcggcaagctggcgatttgcggcacagccaatgacgttgcggtcagtggcgctattccgcgctatctctcctgtggctttatcctcgaagaaggattgccgatggagacactgaaagccgtagtgaccagcatggcagaaaccgcccgcgcggcaggcattgccatcgttactggcgatactaaagtggtgcagcgcggcgcggtagataaactgtttatcaacaccgctggcatgggcgcaattccggcgaatattcactggggcgcacagacgctaaccgcaggcgatgtattgctggtgagcggtacactcggcgaccacggggcgactatccttaacctgcgtgagcagctggggctggatggcgaactggtcagcgactgcgcggtgctgacgccgcttattcagacgctgcgtgacattcccggcgtgaaagcgctgcgtgatgccacccgtggtggtgtaaacgcggtggttcatgagttcgcggcagcctgcggttgtggtattgaacttagtgaagcggcactgcctgttaaacctgccgtgcgtggcgtttgcgaattgctgggactggacgccctgaactttgccaacgaaggcaaactagtaatagctgttgaacgcaacgcggcagagcaagtgctggcagcgttacattcccatccactggggaaagacgcggcgctgattggtgaagtggtggaacgtaaaggtgttcgtcttgccggtctgtatggcgtgaaacgaaccctcgatttaccacacgccgaaccgcttccgcgtatatgctaataaaattctaaatctcctatagttagtcaatgaccttttgcaccgctttgcggtgctttcctggaagaacaaaatgagttatacaccgatgagtgatctcggacaacaagggttgttcgacatcactcggacactattgcagcagcccgatctggccagcctgtgtgaggctcttagccaactggtaaagcgttctgcgctcgccgacaacgcggctattgtgttgtggcaagcgcagactcaacgtgcgtcttattacgcgagccgtgaaaaagacacccccattaaatatgaagacgaaactgttctggcacacggtccggtacgcagcattttgagccgccctgatacgctgcattgcagttacgaagaattttgtgaaacctggccgcagctggacgcaggtgggctatacccaaaatttggtcactattgcctgatgccactggcggcggaagggcatatttttggtggctgtgaatttattcgttatgacgatcgcccctggagcgaaaaagagttcaatcgtctgcaaacatttacgcagatcgtttctgtcgtcaccgaacaaatccagagccgcgtcgttaacaatgtcgactatgagttgttatgccgggaacgcgataacttccgcatcctggtcgccatcaccaacgcggtgctttcccgcctggatatggacgaactggtcagcgaagtcgccaaagaaatccattactatttcgacattgacgatatcagtatcgtcttacgcagccaccgtaaaaacaaactcaacatctactccactcactatcttgataaacagcatcccgcccacgaacagagcgaagtcgatgaagccggaaccctcaccgaacgcgtgttcaaaagtaaagagatgctgctgatcaatctccacgagcgggacgatttagccccctatgaacgcatgttgttcgacacctggggcaaccagattcaaaccttgtgcctgttaccgctgatgtctggcgacaccatgctgggcgtgctgaaactggcgcaatgcgaagagaaagtgtttaccactaccaatctgaatttactgcgccagattgccgaacgtgtggcaatcgctgtcgataacgccctcgcctatcaggaaatccatcgtctgaaagaacggctggttgatgaaaacctcgccctgaccgagcagctcaacaatgttgatagtgaatttggcgagattattggccgcagcgaagccatgtacagcgtgcttaaacaagttgaaatggtggcgcaaagtgacagtaccgtgctgatcctcggtgaaactggcacgggtaaagagctgattgcccgtgcgatccataatctcagtgggcgtaataatcgccgcatggtcaaaatgaactgcgcggcgatgcctgccggattgctggaaagcgatctgtttggtcatgagcgtggggcttttaccggtgccagcgcccagcgtatcggtcgttttgaactggcggataaaagctccctgttcctcgacgaagtgggcgatatgccactggagttacagccgaagttgctgcgtgtattgcaggaacaggagtttgaacgtctcggcagcaacaaaatcattcagacggacgtgcgtctaatcgccgcgactaaccgcgatctgaaaaaaatggtcgccgaccgtgagttccgtagcgatctctattaccgcctgaacgtattcccgattcacctgccgccactacgcgagcgtccggaagatattccgctgctggcgaaagcctttaccttcaaaattgcccgtcgtctggggcgcaatatcgacagcattcctgccgagacgctgcgcaccttgagcaacatggagtggccgggtaacgtacgcgaactggaaaacgtcattgagcgcgcggtattgctaacacgcggtaacgtgctgcagctgagtttgccagatattgttttaccggaacctgaaacgccgcctgccgcaacggttgtcgccctggagggcgaagatgaatatcagttgattgtgcgcgtgctgaaagaaaccaacggcgtggttgccgggcctaaaggcgctgcgcaacgtctggggctgaaacgcacgaccctgctgagtcggatgaagcggctgggaattgataaaagcgcattgatttaactgcaaattgccggacagatctgcctgtccggcatattattcatgaggttttttcggacgatatttttccggcagttctggcaccggacgcttgtcatcgatgagatgacgcacggttaagatcggatgacgccacagcattctcggcccggcccaacgcataatctgtttcatctcttcacgctttgcaggctggtaacagtgcaccggacactgcttacaggctggtttctcttcgccgaacacacatttatccagccgcttttgcgcgtaaacaaacaacgcctcgtaatgctccggctccgcactcgcctgcgggcatttcgcttgataaagatcgatcatttttttaatcgtcagtttttcacgagagatacgcttgccggacatgctgcctccacctcattaagatgtatttatattacatcttaatcttaaagggcactatgactccaaagaagaagggttagccaaccgatacaattttgcgtacttgcttcataagcatcacgcaaaagctgcaaaacagcatctttcccggaaccagcatcaagaactcgccgttcgcttcttcccctgaaatgattaactccggtatcatgtgcgccttatgtgattacaacgaaaataaaaaccatcacaccccatttaatatcagggaaccggacataaccccatgagtgcaatagaaaatttcgacgcccatacgcccatgatgcagcagtatctcaggctgaaagcccagcatcccgagatcctgctgttttaccggatgggtgatttttatgaactgttttatgacgacgcaaaacgcgcgagccaactgctggatattagtctgaccaaacgcggtgctagcgcgggagagccgatcccgatggcggggattccctaccatgcggtggaaaactatctcgccaaactggtgaatcagggagagtccgttgccatctgcgaacaaattggcgatccggcgaccagcaaaggtccggttgagcgcaaagttgtgcgtatcgttacgccaggcaccatcagcgatgaagccctgttgcaggagcgtcaggacaacctgctggcggctatctggcaggacagcaaaggtttcggctacgcgacgctggatatcagttccgggcgttttcgcctgagcgaaccggctgaccgcgaaacgatggcggcagaactgcaacgcactaatcctgcggaactgctgtatgcagaagattttgctgaaatgagcttaattgaaggccgtcgcggcctgcgccgtcgcccgctgtgggagtttgaaatcgacaccgcgcgccagcagttgaatctgcaatttgggacccgcgatctggtcggttttggcgtcgagaacgcgccgcgcggactttgtgctgccggttgtctgttgcagtatgcgaaagatacccaacgtacgactctgccgcatattcgttccatcaccatggaacgtgagcaggacagcatcattatggatgccgcgacgcgtcgtaatctggaaatcacccagaacctggcgggtggtgcggaaaatacgctggcttctgtgctcgactgcaccgtcacgccgatgggcagccgtatgctgaaacgctggctgcatatgccagtgcgcgatacccgcgtgttgcttgagcgccagcaaactattggcgcattgcaggatttcaccgccgggctacagccggtactgcgtcaggtcggcgacctggaacgtattctggcacgtctggctttacgaactgctcgcccacgcgatctggcccgtatgcgccacgctttccagcaactgccggagctgcgtgcgcagttagaaactgtcgatagtgcaccggtacaggcgctacgtgagaagatgggcgagtttgccgagctgcgcgatctgctggagcgagcaatcatcgacacaccgccggtgctggtacgcgacggtggtgttatcgcaagcggctataacgaagagctggatgagtggcgcgcgctggctgacggcgcgaccgattatctggagcgtctggaagtccgcgagcgtgaacgtaccggcctggacacgctgaaagttggctttaatgcggtgcacggctactacattcaaatcagccgtgggcaaagccatctggcacccatcaactacatgcgtcgccagacgctgaaaaacgccgagcgctacatcattccagagctaaaagagtacgaagataaagttctcaccagtaaaggcaaagcactggcactggaaaaacagctttatgaagagctgttcgacctgctgttgccgcatctggaagcgttgcaacagagcgcgagcgcgctggcggaactcgacgtgctggttaacctggcggaacgggcctataccctgaactacacctgcccgaccttcattgataaaccgggcattcgcattaccgaaggtcgccatccggtagttgaacaagtactgaatgagccatttatcgccaacccgctgaatctgagcccgcagcgccgcatgttgatcatcaccggtccgaacatgggcggtaaaagtacctatatgcgccagaccgcactgattgcgctgatggcctacatcggcagctatgtaccggcacaaaaagtcgagattggacctatcgatcgcatctttacccgcgtaggcgcggcagatgacctggcgtccgggcgcagtacctttatggtggagatgactgaaaccgccaatattttacataacgccaccgaatacagtctggtgttaatggatgagatcgggcgtggaacgtccacctacgatggtctgagcctggcgtgggcgtgcgaggaaaatctggcgaataagattaaggcattgacgttatttgctacccactatttcgagctgacccagttaccggagaaaatggaaggcgtcgctaacgtgcatctcgatgcactggagcacggcgacaccattgcctttatgcacagcgtgcaggatggcgcggcgagcaaaagctacggcctggcggttgcagctctggcaggcgtgccaaaagaggttattaagcgcgcacggcaaaagctgcgtgagctggaaagcattagcccgaacgccgccgctacgcaagtggatggtacgcaaatgtctttgctgagtgtaccagaagaaactagccctgcggtcgaagctctggaaaatcttgatccggatagtctcaccccgcgtcaggcgctggagtggatttatcgcttgaagagcctggtgtaataacaattcccgatagtcttttgctatcgggaatattaacgacaactgacgaataaaataaaaacaccctgtataataggaaagcttattttacagggtaaaaccatgccatctacacgctatcaaaaaatcaatgcccatcactatcgccatatatgggtcgttggtgatattcatggtgaatatcagttattacaatcccgcttacatcaactctcttttttccccaaaatcgacttacttatttctgtcggcgataatattgatcgtggaccggagagtcttgacgtcctgcgcctgctaaaccaaccctggtttacgagcgttaaaggcaaccacgaagcgatggcgcttgaggcattcgaaactggcgatggcaatatgtggcttgccagcggtggtgactggtttttcgatttaaatgatagtgagcaacaagaggcaatagatctgttgctgaaattccatcaccttccacatattattgaaatcactaacgacaacataaaatatgccatcgcacatgcagattatccggggagtgaatatctctttggtaaagaaatagcggagagcgaattactctggcctgttgatcgtgtgcagaaaagccttaatggcgagttacaacaaataaacggcgctgattattttatatttggacatatgatgtttgataacattcagacgttcgctaaccagatttatattgataccggaagcccgaacagcgggcggctgagtttttataaaataaagtaatctcatgcttcttctgtgaagcatgagtaacccggtgttattgcaggccattattcatttttcgctaccagcaaagagagatcctgcttcaccagcgcgcgactggcactctccggcaaaccgtcgtctgtaataatctgatcaaactcgcttaatggtaacgccagccatgtcgccacctgaccatatttcgtcgcatcacagaccaaaactcgctggcggctggcactggcaatcgcccgtttcaccgtgactttatcttccgctggcgtagaaatcccccgcacactccaactgcttgcagaaataaaagcctgatcaatcatcaggctgcgcagcatggtcgcagcggcttccccgacacaggaacggttttcccgacacactgcaccgccagtgtgaataattgtgcaattactgttgtcgagcaagtagtccgcaataacgaaatcgtttgtgaccacagtcagactctccatgtgaatcagatgctgtgctatcgctaacgtggtcgttcccgcatccagatagatacaacttcccggctgaacaagacttgccgccagcttgccaatagccgctttttgcgtcattgccagcgcagtttttacctgatgagaaggttcatgcgccacgcgtcccggagactggacgcctccggacaccagcacaacggctccctgctgctccagtttttgtaaatcccgacgaatggtcatatgactcacattcattctgtccgttagttcagcaatactgacaatgcctttttcagctaccatctcaaggatgatttggcgacgctctacgggtatcaacttttgctccttcctttgtcctgcactcattctacgctatttgcctgcgaaacgtgcgcggcgcaactaacgcttagttcacataaaataacacacaatgttaatttatgtgaatcagatcaccataccgttatcttccagcgcttatattcacaatatcaaacaaaatatcacttaaattaacaaggagagcagatgaaaacgggatctgagtttcatgtcggtatcgttggcttagggagtatgggaatgggagcagcactgagttatgtccgcgcaggtctttctacctggggcgcagacctgaacagcaatgcctgcgctacgttgaaagaggcaggtgcttgcggggtttctgataacgccgcgacgtttgccgaaaaactggacgcactgctggtgctggtggtcaatgcggcccaggttaaacaggtgctgtttggtgaaacaggcgttgcacaacatctgaaacccggtacggcagtaatggtttcttccactatcgctagtgctgatgcgcaagaaattgctaccgctctggctggattcgatctggaaatgctggatgcgccagtttctggtggtgcagtaaaagccgctaacggtgaaatgactgtcatggcctccggtagcgatattgcctttgaacgactggcacccgtgctggaagccgttgccggaaaagtttatcgcataggtgcagaaccgggactaggtagcaccgtaaaaattattcaccagttgttagcgggcgtacatattgctgccggagccgaagcgatggcacttgcagcccgtgcggggatcccgctggatgtgatgtatgacgtcgtgaccaatgccgccggaaattcctggatgttcgaaaaccggatgcgtcatgtggtggatggcgattacaccccgcatagtgccgtcgatatttttgttaaggatcttggtctggttgccgatacagccaaagccctgcacttcccgctgccattggccagtacagcattgaatatgttcaccagcgccagtaacgcgggttacgggaaagaagacgatagcgcagttatcaagattttctctggcatcactctaccgggagcgaaaagttgagctaaactctaccgggagcgaaatcatgatcaagattggcgttatcgccgatgattttaccggcgcgacggatatcgccagttttctggtggaaaacggtctaccaacggtacaaattaacggtgttccaacaggtaaaatgccggaagcaatcgacgcactggtgatcagcctgaaaacgcgctcctgtccagtggttgaagccacacagcaaagcctggcggctctgagctggttgcaacagcaaggttgcaaacagatctatttcaaatactgctctactttcgacagtacggcgaaaggtaatattggcccggttaccgatgccttaatggatgctctcgacacgccgtttacggtcttctctccggccctgccggtcaacggacgtacggtttatcaggggtatttgttcgtaatgaatcaactgctggccgaatccgggatgcgccatcacccggtaaatcccatgaccgacagctatcttccccgtctggttgaagcgcaatccacagggcgctgcggcgtcgttagcgcacatgttttcgaacaaggtgtggatgccgttcgtcaagagctggctcgcttacagcaagagggctaccgctacgcggtgcttgatgcgctgaccgaacaccatctggaaattcagggagaagccttgcgcgatgccccactggtaacgggcggttctggtctggcgattggcctggcccggcagtgggcgcaagaaaacggtaaccaggctcgcaaagcagggcgtccgctcgctgggcgcggcgtagtgctctccggtagttgctctcaaatgaccaaccgccaggtagcacattaccgtcaaattgcaccagcccgtgaagttgatgtggcacgctgcctcagtattgaaactctggccgcttatgcacacgaactggcagagtgggttctgggccaggaaagtgtacttgctccactggtttttgccaccgccagcactgacgcattggcagcaattcaacagcaatacggtgcacaaaaagccagtcaggcagtagaaacactgttttctcaactagcggcgcggttagcagcggaaggcgtgacacgctttattgtcgcaggcggtgagacctccggcgtagtcacacagagcctgggaataaaagggtttcatattggcccaaccatttccccggcgtgccgtgggtaaacgcactggataagcctgtctcactcgcccttaaatctggcaacttcggtgatgacgcctttttttcacgagcccaaagagagtttttatcatgagcgatttcgcaaaagtagagcagtctttgcgagaggagatgacgcggattgccagtagtttctttcagcgcggctatgcaaccggtagcgctggcaatctgagcctgcttttacctgacgggaatttactggcgacaccgacaggtagttgcctgggcaatctcgatccgcagcggctttccaaagtcgccgcggatggcgaatggttaagtggtgacaaacccagcaaagaggtgctctttcatctggcgctgtatcgcaacaatccgcgctgtaaagcggtggtgcatttgcacagcacatggagcacggcgctttcctgcctgcaagggctggacagcagcaacgttattcgtccgttcacaccatacgtggtgatgcggatgggaaatgtcccgctggtgccttattaccgaccgggcgataaacgcatcgcacaggatctggcggaactggcagcagacaatcaggcttttttactggcaaatcatggcccagtggtttgcggtgaaagcctgcaagaagccgccaacaatatggaagagctggaggaaacggcaaagctgatttttattctcggtgaccgcccgatccgttatctgaccgcaggtgaaattgcggaattaaggagttaatgcaatgcctcgttttgcagctaatttatccatgatgttcaccgaagtgccttttattgaacgcttcgccgcagcgcgaaaagccgggttcgatgctgtggaatttctgtttccctataactactccaccctgcaaatccaaaagcaactggagcaaaaccatctgacactggcgctgttcaataccgctcccggagatattaatgcgggggaatggggattatccgcccttcccggacgtgagcacgaagcacacgcagacatcgacctggcactggaatatgcattggcgctcaattgtgaacaagtccatgtgatggcaggcgtcgtgcccgctggcgaagatgctgaacggtaccgggcagtatttatcgataatatccgctacgctgccgaccgctttgcgccacacggcaagcgaatattagttgaagcactcagccccggcgttaagcctcattatctcttctccagccagtatcaggcactggctattgttgaagaggttgcgcgagataacgtgtttattcaactagatacttttcatgcgcaaaaagtagatggcaacctgacgcatttaatccgcgactacgccgggaaatatgcgcacgtacaaattgccggactacctgatcgacatgaaccggacgatggagaaatcaactatccgtggctgttccgcctgttcgatgaggtgggatatcagggctggatcggttgtgaatataaacctcgtggcctcaccgaagaagggcttggctggtttgacgcctggcgctaattcgttaaatccctaattacaacgtacccatacatccccccatctacggatggggtaggttaactataactttcagacagggtttcccatgtccacaattacattgttatgcattgcgttagctggcgtaatcatgctgttgctgctggtcatcaaggcaaaggtacaaccattcgttgctttgctcctcgtcagcctgttagtcgcacttgcggcaggtataccggcgggcgaagtgggtaaagtgatgatcgccgggatgggcggtgtgcttggttccgtcactattattattggtctgggcgctatgctggggcgtatgatcgaacactctggtggtgcagagagtctggctaattatttcagtcgcaagttaggtgacaaacgaactatcgctgcgctgactctggcagcgttcttcctcggtattcccgtcttctttgatgtcggctttattattcttgcgccaatcatttacggttttgccaaggttgccaaaataagcccactcaaatttggcctgcctgtcgctgggatcatgctcactgttcacgtggcggtaccgccgcatccaggccctgtcgccgcagcggggttactccacgcagacatcggctggctaaccatcatcggtattgcgatttctattcccgtaggggttgttggctactttgcagcgaaaataatcaataagcgccaatatgcgatgagtgtagaagtactggaacagatgcaactggctccggccagtgaggaaggcgcgacaaaattaagcgataaaataaatccaccgggcgtcgcgctggtcaccagcctaattgttattcctatcgcgattatcatggcgggtacggtttccgcaacactgatgccgcctagccatcccctgcttggtacgctacagctgatcggcagtccaatggtagctctaatgattgcgctggtgctggcattctggttattggctttacgtcgcggctggagcttacaacacaccagcgacattatgggcagtgcgcttcctactgcggcggtagtgattttggttactggtgctggaggggtatttggcaaagtgctggtggaaagcggcgtcggcaaagcccttgccaacatgctacaaatgattgacctgcctctgttaccagccgcatttattattagtctggcgctgcgtgcaagccaggggagtgcaaccgtagcaatactgacaaccggcgggttactcagtgaagcggtgatgggattgaatccgattcagtgcgtattggtgacgctggcagcctgctttggtgggcttggtgcgagtcatattaatgacagtgggttctggattgtgaccaaatatctggggttgagcgtagcagacggtctgaaaacctggacagtgttaacgaccattctcggttttaccggattcttaattacctggtgcgtatgggcggtaatttgaccttaataaaaaggtccgatgggcatcggaccttttattgtgcacagaaaaggccagcctcgcttgagactggcctttctgacagatgcttacttactcgcggaacagcgcttcgatattcagcccctgcgtttgcaggatttcgcgcaaacggcgcaggccttcaacctgaatctggcgaacacgttcacgggtgaggccaatttcacgacctacatcttccagtgttgccgcttcgtaccccagcaaaccgaatcgacgtgccagcacttcacgctgtttggcgttcagctcgaacagccatttgacgatgctctgcttcatatcgtcatcttgcgtggtatcttccggaccgttctctttttcatcggccaggatgtccagcaacgctttttcggaatcaccacccagcggggtgtctacgctggtaatgcgctcgttaagacgaagcatacggctgacgtcatcaactggcttatccagttgctctgcgatctcttccgcacttggttcatggtccagcttatgggacaactcacgtgcggttcgcaggtaaacgttcagctcctttacgatgtgaatcggcaaacgaatagtacgggtttggttcataatcgcccgttcaatcgtctggcgaatccaccaggttgcgtatgtactgaagcggaaaccacgttccgggtcaaacttctctaccgcgcggatcagccccaggttgccctcttcgataaggtccagcaacgccagaccacgattgccataacggcgggcaatttttaccaccagacgcaagttactctcgatcatccggcggcgagaggcgacatctccacgcagtgcgcgacgcgcaaaataaacttcttcttcggccgttaacagtggactataaccaatctcaccaaggtaaagctgagtcgcgtccaacacacgctgtgtggctccctggcttaacagttcctcttcggccaaatcgttatcactgggttcctgttctactaaggccttttcgtcaaaaacctcaactccgttctcatcaaattccgcatcttcatttaaatcatgaactttcagcgtattctgactcataaggtggctcctacccgtgatcccttgacggaacattcaagcaaaagcctggttccgccgatttatcgctgcggcaaataacgcagcgggtttacggatttccccttgtaacgaatttcaaaatgcaagcgtgtactactggttccggtgctacccatggtcgctattttttgccccgccttaacttcttgttgttcccggaccagcattgtgtcgttatgggcgtaggcactcaggtaatcatcattatgtttgatgataatcagattaccgtagccgcgcagcgcgttaccagcataaacaacgcggccatctgcggtcgcgataattgcctgtcctttgctgcctgcgatatcaatccccttgttgcccccctcagaagcgccaaaggtttcgatcactttgccctcagtcggccagcgccaggtggagataggcgtactggtacttgtactgctgacagtcggctcggttgtgcttgctgttggtaccgttacaggcgctgtgaccgtggtcgcagttggcttgttgttcggcaacattttgttagcactctgttcaccgctagactcagaatacgtaattgtcggttggctcgcaacagcaacggtggaattttgtgcaggcttgatcacaactccttgctctgctgcgtcggcctgggtaatggcatttccgccagtgattggcgtaccggaagcattacccacctgcaaggtctgaccaacgttcagcgcgtatggtgcctgaatattgttgcgctgagcaaggtcacggaaatcgttgccagtaatccaggcgatatagaaaagtgtgtcgccttttttcacggtataggtactgccgctataactgcctttcggaatgttcccatactgacggttatagacgatgcgtccgttttccatctgtaccggctgctgagctactggctgcactggctggatttgcggttgttgagtagcctgaatttgtggctgctgcaccggctgaatttgcggttgctgcgctgtagacgtcgtccccattttcggcggcggcgtaatcaacataccagaattagtatttgcaggcgcattgccattaacggagctgaccggtgccggtggattactagtgtcagaacagcctgccagccataggctaaccagactcaaagccgcaatgcggcgaacggtgaattttgggcttcccgcgctcatttatcccccaggaaaaattggttaataaccagtgacataattaccgtgcaaggcaccctactgaacactggaaaagatgttcacgatacgctgacctgcggcaaaataaccaggaaaaatccaggtatttcctcacgttttaagccagctcacccttcactaaagggacaaagcgcacggcctccacggtatcgataataaattcgcctccccgacgacgcacccgtttcaaatactggtgctcctcccctacgggtaagacgagaatcccgccttcgtccagctgcgtcattagcgcagttggaatttccggcggtgccgccgtaacaatgatagcgtcaaacggcgcacgtgcctgccaaccttgccatccatcgccatgacgggtactaacattatgtaaatcaagatttttcaggcggcgacgtgcctgccactgcaagcctttaatccgttcaacgctgcaaacatgctggacaagatgcgccaggattgccgtttgatatccgctaccggtgccaatttccagcacccggctctgcggcgtcagctcgagtaattcggtcattcgcgccaccatatatggctggctaattgtctgcccctgacctatcggcaaagcgatattgtcccaggctttttgttcaaacgcttcatcaacgaatttttcacgcggcacggcggcaagtgcattcagcacctgctcatcctgaataccttgcgcacgtaattgatccagaagtgcttgtacgcgtctgcttaccattgcgtgccaactcccacgctgtttaaccagtcactaaccacatcttgcgcgctatgcgcagttaaatccacatgcagcggcgtgatggagacatagccctcatctaccgcagcaaaatcggtccccggaccagcatcacatttaccgcccggcgggccaatccagtacagcgtattgccgcgcggatcttgctgcgggatcacctgatctgccggatgtcgtgtaccgcagcgcgtcacgcgaatacctttgatttgatccaagggtaaatccggaacgttaatattaagaatacgcccggtgcgcagcggctctttacacagtgcgcgcaaaatactacaggttaccgccgcggcagtgtcgtaatgtttatgcccgtcaaggctgacggcaagcgccggaaaacctaaatgacggccttccatcgcggcggctaccgtaccggaataaataacatcatcccccagattcggcccggcgttaattccggacacaacaatgtccgggcgcggacgcatcagagcattcacgccaagatagacgcaatcggtcggggttcccatttgcacagcaatatcaccattttcaaaggtaaacgtgcgcagggaggattccagtgtcagagaattactagcgccgctgcggttacgatcgggggcgaccacctgaacgtcagcaaactcacgcaaggctttcgccagcgtttgtataccgggtgcatgtaccccgtcatcattactcagcaatatgcgcataatcacctgttgtgttgataagttccctgacaacgctggttgcaaaactacccgccggaagccagaaacggatctctacggtgacgtcatcccaccaattccagcttaattgttgcggatacagcagcatcgctctgcgcgcggcttcaactttttcgcgcaccagtaaagcttgtaattcagtttctgcggcgacagctgcttgttcgaatgccagcgcttcacgctgagttccccattcgccactgcctggcaatgcggcggttatcatcaactctttatcgttgacgcgacgctgtaattccgccagttcttcggtggttgcgacaaaccagctaccacgtccggctaattgtagcgcatcgccgtcaacaacttgattaacgtctgcttttttgaggcgctcagcaacaatctgattaaacaacgcactgcgggctgcgctcaaccaaaaactccgtttattgcgatcgcgcaccggagtattggtttgcgcccagcgctgcgccccctgcaagttgctaccgccaatcccaaaacgttgggcaccgaagtagttcggtacaccttttacgcaaatatcgatcagacgttgttcaacgtcatcgcgattgctcacttcgcgcagaaccagggtaaaggcgttacctttcagcgcgcctaaacgcagcttgcgcttgtgccgcgcatactccagcacctggcagccttccagttgaaaggcgctcagatcgggcatttccttgcccggcacgcgagcgcataaccactgttccgtaacagcatgtttgtctttttgcccagcgaagctgacttcacgggcatgaattttcaggaatttcgccagtgcatccgccacaaaacgggtattgcagccgtttttgaggattctaaccagaatatgctcaccttcaccatcaggctcaaagcccaaatcttccaccaccacaaagtcttccggattggctttcagcagcccggtgccttgcggtttaccgtggaggtaagtgagattatcaaactcaatcattttgttgccttaatgagtagcgccaccgcttcacaggcaatcccttccccacgtccggtaaatcccagtttttccgtagtagtggctttcacgttaacatcatccatatggcagccgagatcttcggcaataaacacgcgcatttgtggaatgtgcggcaacatcttcggtgcctgagcgatgatagtgacatcgacgttgccaagggtataacccttcgcctgaatacgacgccaggcttcgcgtagcagctcgcggctatcggcacctttaaatgccggatcggtatccgggaacagcttgccgatatcccccagcgccgccgcgccaagcaatgcatcggtcaacgcatggagcgccacgtcgccatcagaatgcgccagcaatcctttttcgtaaggaatgcgtacgccaccaatgataattgggccttcaccgccaaaggcatgtacgtcaaaaccgtgtccaattcgcattatgtattctcctgatggatggttcgggtgaggtaaaactcggccagtgccaaatcttccgggcgcgtgactttaatgttatccgcacggccttcgaccaactgaggatggaatccgcaatattccagcgcgctggcttcgtcggtaatagtcgcgccttcatttagagcgcgcgtcagacagtcatgtaacagctcacgagggaaaaattgcggcgtcagcgcgtgccataagccgttgcgatcaacggtatgagcaatggcatttttgcccggttcggcacgtttcatagtatcgcgcactggtgcggcgaggatcccccccgtgcggctggtttcgctcaacgccaacaatcgcgcgaggtcatcctgatgcaaacaaggacgagcggcgtcatgcaccaatacccactgcgcgtcgccagcggctttcagacctgccagcacggaatcggcacgctcatcaccgccatctacaacggtgatttgcggatgattcgccagaggaagttgtgcaaaacggctatcgccaggacttatggcaatgacgacacgtttcacccggggatgcgccagcagcgcatgcacgctgtgttcaagaatggtttgattaccgatactgagatattgcttaggacattccgtttgcattcgacggccaaatccggccgccggaaccacggcgcaaacatccaaatgagtggttgccatgttaattcccgggctgatttatcgattgttttgccccgcagactgtgcgcgcttgctcgcgtcaggcaccagacgataaaaagtttcgcccggcctggtcatgctgagttcattacgcgcacgctcttcgagcgcctcctggccgccattgagatcgtcaatttcggcaaaaagttgatcgtttcgcgctttaagtttcgcgtttgtagcttgctgtgccgccacatcatcattgacgcgggtatagtcatgtataccgttcttaccgaaccacaggctatactgtagccagaccagaatagccagcaacagcagcgttagtttacccatcctgccccctgaaaaacggcatcatcatcccatgcatccgaagacgactctacatcctctgttggggataccgcgacaacgcgggcaaatgtaccacatttgtccattgttacgtatacccagggcgtgcagaacataatctcattattagttacggtttgaattatgaacagaggagacgggaaagtacaaattagcccagtagccacataaacagtgcgccaaacataatgcctactgtcaccagggtgaaaacaatactgtagcgtagctttccgtccatcaaactatgcagcgcaatccccaccactaccgcgacgggcatcagcgccagaaagaaaggccaggtgtagataaagaagaacagcgtgttagagccataaatcaacatcggcatcgccagcgcaaataaccaggagataaaaccgaccacggcaccaggcagactccatgtggtttcttcatcctcagtaaggctgtcgttatttgttagtgtaatgttatggctattacgcatatttgatcctgttactttgacgaaccgggcatggaaacccggtggtgtctcaggatctgataatatcgttctgtctcaacagatctaataattgctgtaccaaatttgttactaattgttcaccattgagatgaatttctgcgctttcaggcgcttcgtaaacggaatctattcccgtaaagttgcgcagttcaccggcacgcgctttcttatataagcctttgggatcgcgggcttcgcaaatcgccagcggcgtatcgacaaacacttcgataaagcgcccttctcctacgcgttcgcgaaccatctggcgttcggcgcggtgtgggctgataaatgcggtcagcaccaccagtccggcttcaaccatcaaattcgccacttcaccgacgcgacggatattctctttacgatcggcatcgctaaaaccgagatcgctgcataatccgtggcgaacattgtcgccatccagcagatacgtactgacgccgagtttatgtaacgcctcctccagcgccccggcgaccgtacttttaccggacccggagaggccggtaaaccacagcactacaccacgatgaccgtggtgtagctcgcgttgttgcacagtgaccggatggctatgccagacgacgttttcgtcatgcagcgccattatttatcccccagcaaatcgcgcgcgccccagtgcggaaagtggcgacgaaccagagcattcaattccagttcgaatgcactgaattcagatggcgcagcagttgcctggctaactggctcgtgcaccataccggcacccacggtcacattgctcaggcgatcgataaaaatcagcccacccgtcaccggattttgttgataacgatctaacaccagcggctcgtcaaaagtgagatccacgaggccgatcccattcagtggcaggttttcaacttcacgctgggtaaggttattaatatcaacctgatagcgaatgccatcaacacgcgcgcgcgtcttcttaccggcaattttgatgtcgtaactctgccctggagaaagcggctgttccgccatccataccacatccacgctcgcgctctgcaccgccggtaacgcttcgtctgccgccagcagcagatcgccacggctgatgtcgatctcatccgtcagcaccagggtgatcgcttctccggcaaaggcttcttcgcgatcaccatcaaaagtcacgatccgcgcgacgttactttccacaccagagggcagcactttgacacgttgcccgacttccacgcgaccggatgccagcgttccggcgtaaccacgaaaatcgagattcgggcgattaacgtactgcaccgggaagcgcattggctgagcatccaccactcgctggatctccacggtttccagcacttcgagcagtgtcggaccgctgtaccacggcatactttcactttggcttgccacgttgtcgccttccagtgcagagagcggcacaaagcggatatccagattacccggcagctgcccggcaaaggtcaaataatcttcacgaatacgggtgaacgtctcttcactgtaatccaccagatccattttgttgatcgccacgaccagatgtttgatccccaacagtgtggagataaaactgtgacgacgggtttgatcgagcacgcctttacgggcatcgatcagtaagatcgccagttcacatgtgcttgcgccagtcgccatattgcgggtgtactgctcgtgccctggggtgtcggcgataataaatttacgcttctcggtagagaaatagcggtaggccacgtcaatggtgatgccctgttcgcgctcagcttgcaggccgtccaccagcagagccagatccagcttttcgccctgggtgccgtgacgcttactgtcgttatgcaggctactgagctgatcttcgtagatttggcgggtatcgtgcagcagacgaccaatcagagtacttttgccgtcatcgacgctaccacaggtcagaaaacgcagcaggcttttatgttgttgcgcaatcatccaggcttcgacgccgccttcattggcgatttgttgtgcaagtgcggtgttcatcttaaaaatacccctgacgttttttcagctccatagaccccgcctggtcgcggtcaatcacgcggccctgacgttcactggtggtggaaaccagcatctcttcgatgatttccggcagtgtttgtgcattactctccaccgcaccggtcagcggccagcagcccagcgtacggaaacgcaccatccgttttttaatcacttcgcccggttgcaggtcgatacggttgtcatcaatcatcatcaacataccgtcgcgttccagaaccggacgttccgcagcgagatatagcggaacaatgtcgatattttccagccagatgtattgccagatatcctgctcggtccagttagagagcgggaagacgcggatgctttcgcctttgttaatttgcccgttgtagttgtgccacagctccgggcgctgatttttcggatcccagcgatggaagcggtcacggaaagagtaaattcgctctttagcgcgggatttctcttcgtcacggcgcgcaccaccgaaggcggcatcaaaaccgtatttgttcagcgcctgtttcaggccttcagttttcataatatcggtatgtttcgcgctgccgtgcacgaatggattaatccccatcgccacgccttccgggtttttatgcaccagcagttcgcagccgtaggctttagcagtacgatcgcggaactcatacatctcgcggaatttccagccggtatcgacatgcagcaacgggaaaggcagcgtacctggataaaacgccttgcgcgccagatgcagcatgacgctggaatctttaccgatagagtagagcatcaccggattactgaattctgccgccacctcgcgaataatgtggatgctttccgcctccagttgccgcaggtgagtaagtcgtatttgatccataaccgttcctttgcaataccgctattttcttgccatcagatgtttcgactatagggagcgtaagagaacgaatgaaattaccaattagaatgagtagttccttaacggaataacgatttggcaaagctaatatcaaaaagtgcttaaggcaccggatttcgggcgtttaggaagatttgaaattgttttagcgcagcggcagtttcatactatggcggtaaaaaaatttgcatggtatttaaggactcactatgttttccgcattgcgccaccgtaccgctgccctggcgctcggcgtatgctttattctccccgtacacgccagcagtcctaaacctggcgattttgctaatactcaggcacgacatattgctactttctttccgggacgcatgaccggaactcctgcagaaatgttatctgccgattatattcgccaacagtttcagcaaatgggttatcgcagtgatattcggacatttaatagtcggtatatttataccgcccgcgataatcgtaagagctggcataacgtgacgggaagtacggtgattgccgctcatgaaggcaaagcgccgcagcagatcatcattatggcgcatctggatacttacgccccgctgagcgatgctgacgccgatgccaatctcggcgggctgacgttacaaggaatggatgataacgccgcaggtttaggtgtcatgctggaattggcagaacgcctgaaaaatacgcctaccgagtatggtattcgatttgtggcgaccagcggcgaagaggaagggaaattaggcgctgagaatttactcaagcggatgagtgacaccgaaaagaaaaatacgctgctggtgattaatctcgataacttaattgttggcgataaattgtatttcaacagcggtgtaaaaacccctgaggcagtaaggaaattaacgcgcgacagggcgctggcaattgcgcgcagtcacggaatagccgcaacgaccaatccgggtttgaataaaaattatccgaaaggcactgggtgttgtaatgacgcagaaatattcgacaaagcgggcattgctgtacttagcgtggaagcgactaactggaatcttgggaataaggatggttatcagcaacgcgcaaaaacacctgccttcccggcgggaaatagctggcatgacgtaagactggataatcaccaacatattgataaggctcttcctggaagaatagaacgtcgctgccgtgacgttatgcggataatgctacctctggtgaaggagttggcgaaggcgtcttgatgggtttgaaaatgggagctgggagttctaccgcagaggcgggggaactccaagtgatatccatcatcgcatccagtgcgcccggtttatccccgctgatgcggggaacaccagcgtcaggcgtgaaatctcaccgtcgttgccggtttatccctgctggcgcggggaactctcggttcaggcgttgcaaacctggctaccgggcggtttatccccgctaacgcggggaactcgtagtccatcattccacctatgtctgaactcccggtttatccccgctggcgcggggaactcccgggggataatgtttacggtcatgcgccccccggtttatccccgctggcgcggggaactctgcgtgagcgtatcgccgcgcgtctgcgaaagcggtttatccccgctggcgcggggaactctctaaaagtatacatttgttcttaaagcattttttcccataaaaacaacccaccaaccttaatgtaacatttccttattattaaagatcagctaattctttgttttcaaacaggtaaaaaagacaccaaccttaaaccatccaaatctaccggggtacgcctgtttaacccaaatgtctggaactcaaatcccgtttccgtattcgttgcccatgccatcactacattgccttcttccgccagtccagctatttgttcccagatcatttcacgaatttttgcggatacatcacctacatatacccctgcacgtacctccaacaaccagatggctaatctgcctcgtaagcgcggaggtacattttcagtgaccacgaccaacatactcatttcagctactccgatggcctgcatctcccagactaacaggaagcggaatggcaacaggctgtgcatcttcaggtggggccggcggttgtatttctccagcggcaagcacgtcctctataagcggaatcaatttggctaatgttttactactgcgaaaaatatccctgcacgccaaacggacttcccggtccggctcaccagggttacgacgcgctatctcaaaagctttcggtacaacagtgtcaaatttaatgatgtctgcaatatcgtaaacaaaggaaagaggctttcctgtatgcacaaacccaatagctggtgcataaccagctgcaagtatcgccgcttcagttacgccgtataaacaggaagttgcagcgctaatgcattggttgatcgtatcgcccttttcccagtctttcggatcgtagcgacgtccattccatgtcacgccgtattgcttcgccagaagtgcgtaggttgcccgcacgcgactgccttctatacctctgagttgctctacggagcgccgggcaggcgcaggttctccaaaccgaagttcaaacattttacgtacgaccttcagacgcaaatcttcatccagagcaagttttgcctgatagagcagcttatcactacgcgcacctccaggctgaccagaagcataaacacgaacgcccgcttcccccacccataccaacaatgttccaacttgcgcagccaggcgtacagctgcatggctaacccgtgtaccaggttccagcatgatgcaggcaacgctgccaacaggaatatgagtgcggatccctgtcttgtcgataagtacaaacgcgccatctattacatcgatctgcccatattgcagaaagatcatggagacgcgatctttgagtggaatgggattaaggggaagccaggtcattttattacacctcaatcacagtggagccaaagatagcaagccacatcccatgcttttagctggcccaataccttgctgtacaagatctattaacgctggcgcgtcgttgatggtgagcacaccttcaaagcaaaccgtttggatctttccacttttaccatcaccagaaaaatactgtggccgttcgcttatgggatgcacatcttcaacgcgcgccgcattgcccaatttacgttgcaaccacgcgatttgttctgcttcttttattaacggaacccgacagcgtttaatattccctttactgtccaggcgcttttgattgtcgagaatagttttgatcggatttgcccgaagccgaaaatagagtggaacaccaacctgaagttgaaattcaacctgtttagttttaatgactgtcgcaacggcagtactaacaggcatttgcgcactctgcaataaaacatgacagccttctggtgtgtttcgcttctcaacatgaaaaagaaaatcacgagcagcatccggtctgtttggaaataaatgccataatccctggtgaagttggtaaagatccctgctccaggccctggcaatgatgactttactgagatacatccatacctcctttaatcacataccattctcgggaagcaaattgtcgaggcaaggtgatcatcggttcgtcgcgcgccgtaaattttaaatgatgccctgtaacactttcctcactatatatatcgccgccaacgggctcataatttaatagcgccttctgaggatcgcttgcctgacatgtccccaaaaaaagcgggtgtgttagtgggcaacttctccgccccaggtaaggtgtataccgaggctttaatactgctttttcaagttcactgataaccatcgttgcatggggtgttaaccagagagcgacggtaaaggaggcatcacataaatattcgcgccatgtttgaatcgtttcatgacttttcaaaccacggtaatcttctcgcgctccaaggactgtatggtaatcacgcaaccccgttacagacacacgacgatcgtcaagaatgagttcatcgcagcgcactgcaaattgcacactctcacttaacgcctgtaaactagaagtatcatcacgttggatcccaagacaagccccgagtagccctaataacccgcttcgggtcggaaatcttccggtaggtcgcgttccttcaaaggtcggctgcccccaggcttgcattggcccagcaagccgcaagatcaaataagatctcatgttcacgcctcgccattattacgaacccaggattttaactgttctaaagtaggcatttgtttaacttgagcagtaattgggtctacatcagataagctgaattgcgcagcagctccgttcagaccatatccattggcaacgcgatcccaatattgattaaacgcctgtatagacggttgcaaaaagccatctttcgctttaaccgctttttcaaaagcatttgccatagaaagtggcatatcggagaaattaaccattaccatatccgcagggttaaaagcggcataagtacgctgttttgctccagggacctctgttgccagcatatgaacaacatgggttgcaatttccagagcctgctccctggaggcaccacctaaattttcctgaagttgagcgaggttaatgttggcataacgataaaaaacaccgctactaaattcctgagttcccagatgtgcagaaccttgttcctgtaaatcatctacagcggtgaaccagtcaatatcagaatcaacctgatgagtagtgatcgcatgcgcaatggacattgcaccatcaacttttcccaactcagtcatcatgccgctggttgccattcttccactaagcgcaatatcaacaccctgctgtaaattcacacgtatggcggcaatatcttccttaagaactttgagcagctttttatcatccagattatcagcctctgcttttgcaacctgctcacagaaccaggctatttctcccacaacccagggagtaaccgcatcggcagaaatcttttcggcttcatcaacacttttaccggagagcagcgctaatgtcttatcgatgattttttggtcaaaacgttcaccaagtttttgccgaagaacatcacgtaattgtgcaagatgaatggttctgagactggattcaccaatattttgtgcgtaataaccacttttacgcatcgcacgtttaaggctttgactactaattcttactcgtcttttgccgccgaaaatagcgtctttctgcatgttcatatcgtcgcggttcagacaactagggctgtgagagatcagaacatgaatattgataaagttagacatagaaaggtttccttacgcatttttgtttgtggtcaatacaaaatcttccagaagttgctggcgttcgcgctttccccaccaggtcaacatcctggccattaatggccagtcaagtacgggttcggcgtgagtaagtaatcgacgtaactggaccatatcggctgttctgtcagcccgaattaattgaaagatacggcgctcgttaattcttccactattggctaaagctcttcccaagctgatacctgttgtttgctcgctttttttgtcctgatgtcggatgacattctttcctgcgctcaggcaaaacaccatgcgcaaaagagcctgctggtgacgtgggttttcccaaccaaaaggttgcaccagcctataaaacgcagggatatcgcgtaattcatcaggttcactaacacgtctaatttgcgcacaacttccattatccagttgttgccaggctcgatataaagccattgcatcaatttcatcagccattacttggccctccttgcggttttaactcccgtaaatgtttgtatagcgtggcgcgggcaagcgctaatgtgcttattaatttaggatgatgtgcatagggagctacagattgattaaatagcatttcacacaattgatgaagtttgtctcgtaaatcagctattacctcatcagcctgggaaaaattaacattcgccagtacatcgggaattaataattcactctgtcgatagaaatgcctttctgcagtctcatgaacagagactccggcccctttgaagtctttatttttaaacccttctgcaaaggtatataacgccttgcgtaaggctgttttatatcccaaaccaacagtcactatttcgtttatcacattgccgtattgttgccacccctgattaaacatcaacacatcatgacgccgttcaagaatagatgcttgattattacgatatccccccataatcaattcaagaggactttgcggcgcaatatttctgaattgattcacaaccgccgccacgcgatttccattttcattttgaataatcttatctaccacaactcggctgatttgtgtccaacttggtgcggaggtggtgaaagcaagaaatttttcctcaacctcccctttcttgactgttaccagacaaggggaatgcggatggggccatagcccattaactgtaaaggtaaatttttccttaagaaaaccggtataacgcaaattgctttcctgtccacagcaagaacatttaccaatcccaatgggatcgcataattcaatatgcgctggttgccagaatagaccacggacaaacccaatactgctagcaggtatagactcattggacttgataggtttaatccaggtaggttggttttccgtatgactttcattaggaaattgtttttgaagacgaggtaatgtgaggacattgagtaacaccgtactacgaagatcgatcccacgtacgaacgttgttacaggtgttcctccacgtaaaccgcttttaaaaccaccaccaaaacctggtgcctgattcgcctggttgaataacgcaatcgcagtgcatccaccacataatgcttcaccctgccccggttgattgacaaatgcacaattcgtcgcgccgcttaccccagccaacagtttttccattggagtcacatcatttgctttgacacctttggtctgcataaagggatgttctgcgtgattaaggtagaacatatctatccacggcgcgatgagttgttgaaactcatcttcagtgagcggattcattatgcgatgtcgaaattcaacgtcatcttttgccggggcgataatttgcccaatgcaaaccagcagtgctaaagcggccagttccatatcgtcacggggcaaacttaatcgccactgatctctactgcagtataggctttgcagatttatgatttggactttccccccgtttcgcgggcgtacagggatccagttatcaataagcaaattcatttgttctccttcatatgctccgacatttctcctgcatttctatacgtcggcacacttccgttatcggtaaaaacaaagaaaaaatacggcgtaattaattcaataatcacattcactgcaaaaatatattcattggtttaatacaattaacctatacatatattaagatgtgttgaattgtttaaagacaataatgcatgcatttcaaatctgcaagttattcgttttattattaaagaaacttttagttataataattaccatgaattttattacataaaatattcatactgtgaatataaaatctcataccgggaaattaaaagaagatgtacattgtgcaccttccctacttaagtagggataaaccgttattggtcttattatcgtcattgataacaatcattcccgaagttatttgggatttgcagggatgactctggtcatcccttcatcccctgtataggtaataacaatactgttaccctgccagacccatccatccagattctgtttcccttccagccaaagtaacccatcttcatctactacttcagaaaaactacgtttccaggtgaagggtacattgacgcgattaagtgcaagcgcctcatactgctgttcatgacttaggtcctcgtagacctggccatcgagcagttgtttaccactagacgtttgtacataaggcaataatggcaggctcatttccccatccctcgttaccgcaagaatggtttcatcgttatcctgcaagctatattcttcagcccactgcaggaccttgcgagccttgaaccttttttcacactcggcgctttcaaatttatccatgccattgccgacccattctggctcatccatttccgcatcatcgtaaatgctatccagccattgccggtaagcatcagggaaaaataaggatgctccattaagctcctcaatatgttgctgcgtccgccacatgactctaacgttgctataaatatgctcatgtcgtccgtaaccctcgccatcaggcagcaaaatggtggcaacaggaatctcaaaaccagcgggacgatatttgcgatgatggcgatgtaaacggcccaatcgttggaaaagcaaatctgcaggacaatgctgagtaattaaccaatcaaaatcaacgtcgagactttgttccacgacctgggttgcgacaagtatccgtccaacatttcgcttcccatttttgccgaaattgctaataactcgattctctttttcacgacgatcgttcagcgtaaagcgcgcatgaaacaaatctatatctacttgcgtgttatttagctcctttagccgttggtagcatacttgtgcaacgtcaaccaaattgcaaataagacagacctgtgcacccgcgtttgccgctgcgatcattcgctctaacatcgtaaggtcaggtaacatgtcagctaaacaaataggttctggctgaatgctaaagcggggcgggagttgttctggatgagctagcagatcaaaacgttgcgcaccattcacacctcgccagttaatgagtggatatgcggagttattttccactggatctgtatgcagaccataagtatccagaagtttctgtttttgtttcattggtagggttgcggaaagaagaataacactccctcccacatcagcctgagccttgagcactgcctccagcaagccgttcatataggtgtcgtaagcatgaacttcatcaacaattaaaacacttcgaccaattcccaaaccacggataaagcggtgtttaactggcaatacgcttatcaacacctgatcaatcgtgcaaacgccgatttgcccaagaaacactttcttattgctttgactcaaccactgacaacactgaacccacgcttcttcttgcccctgttcagtaatcgcgcgactttttatactttgaaagaggtggttaaaccgactattgccatgagcaagaataagatttggggaactaaataagtggctcgcgctcgcttccattctcgtaagcatagcattcgcggtagcttgtgttgggagggcaaaaataacactatccgcaatttgttgatcaataagtttccaagcataggccagcgctgtttccgttttaccggagcctgtaggtgcctctattaccgtcagcccgggagctactggaagagcatcaactaacacctgtaattgtctgggttgatagccattgtccagtagtgcatgaacaccttcataacatcgcttattacttacaagtccactcaactccaatacccggctcgcatcctgctgtcggtcctggaaatacgttctcagagcatttatgtcggaaggcgcatcctcattaaacagaaaggtattcgttgtagtccaggagcctaaccagtcagcaaggctgcaaaaacctgctaacagactactacaatcaggtggtatatcgtttatagataaccccgctggcgttaaaaataatgcttccagtacagatatccactcctcacgagcctgtttatcttgcgcagcataagatgccagagaagctggcatttcccaacggctcttatcttgatcctgggaatgtaatataaaaccatgatgtcctgtaacggcctctacccatggaaaccaggactcataaggatgaggagcggcatcaaaaaaactgaaaaaatccccgagagattgctcactaagactatcctggttaaaccaatacagaccggctgcaccatgattaaatttacggcacatttgtgtacttggaccattaagacttggcgttgcaggatttaatttcagccaactttctgcacttttatattggaatcgtatatcaaactttccaatatcatgaagagcaatgaaaaataacagccaggccttcaccctctgtttacttagcatttcatttcggcaaaaagtattttgcagtacgacactttgatcccaccagcaatctgcaacagcagcaacatcaaggcaatgataaattaacagatgaatatcatttcctttcgtcaagcttttactggattttccccagtaatggcatatatatttaaaaggttccattaatagcctccctgtttttttagtattatcgatgatatcagcgggctatttttcgatgctgctcataaatatcgaattacagtgatatacacatgtcttgcctccctgcaaagaagagactaacattcgaattgtttgggttcgaacgctggcctcaggttgatagaaatatcgcctggggcttttgtccatctggaacctcgcgaatgcttaacgccagacagcctcaagcacccgacgccattctatacctgataattcttcccgcggcgttcacgtttaaaatcaggaatgctgctcgcaaaataaaaacgcccccatcatttctgacagaggcgtttaatttgtccggcaatatttacccttcgtgtaacccacattccctttttaagccaaagaaacgcgtttcttcttccgccatgccgggttcccatttacgggttgtatgggtatcgcccacgcttaaatatccttcatcccataatgggtgatatttcaggccatgtttttgcaggtactgataaatagttcggttatcccagtcgataatcggcagcactttaaatacgccacgctgaattgccagcaccggtaaattggcacgactgccggattgttcacggcgcaggccagcaaaccaggtttgcgcattcagttctttcagagcccggttcatcggttcgactttgttgatgtcattgtacttttcaatgccttcaacgccctgctcccacagttttccgtagcgtgcttcctgccaggctgcgctttcggtagcacggtacactttcaggttgagcttgagtttgtccgttaactcgtcaataaagcggtaggtttccgggaacaagtaacccgtatcggtgaggatcaccggaatatccgggcgaatttgattcaccagatgcaggctcaccgccgcctgaatgccaaagctggaagaaagtacatattcaccgggcagattatccagcgcccaggctacgcggccttcagcgtccagtttttccagttcggcgttagtttccgccagcgccagaatgcgatctaccttcggcagttcgttcagggcgtttagatcgagtttggacatagattcctcactgtttgccttgcctgatgcgacgctcacgcgttcttatcaggcctacaagaccgggctgatggttaatcccacaaatcacgcgccggatcgagcaccgggcgaatgatgcccgcacgcaccgtaaagtcgccgaagccttcacccgcttcgcgctctttcgcccagcgccctatcagttcatcaaggctcgccaggatttccggctcggtgatgttttctttatacatccgtgggatacgtgtcccaatgcggttgccgccaagatgcaggttgtagcgacccggcgctttacccaccaggcccacttccgccagcatcgcgcgaccacaaccgttcgggcagcctgttacacgcatcacgatatgctcatcgctgacaccatgtttcgccattaaattatcgatgttgtcgataaaagacggcaggaaacgctctgcttccgccatcgccagcgggcaagtcgggaaactcacgcaagccatgctgttttcacgctgcggcgtgacggcattcattaacccgctctctttggcgatcttctcgatcttcgctttctcgctttccggtacaccggcgatgatcagattctggttcgccgtaatgcggaaatcgcctttgtggatcttcgcgatctccagcaggccggttttcagcggacgcgccggataatcaaggatgcgaccattttcgataaacagcgtcaggtgccagttatcatcaatgcccttaacccagccaatacgatcgcctcgtccggtgaactcatatggacggatcggttcaaatttgatccccgcgcgacgctccacttccgctttaaacgtctcaacccccacgcgctccagcgtgtatttggttttggcatttttacgatcggttcggttaccccagtcacgctgagttgtcacgacggcttcggccaccgccagcgtatgctccagcggcagatagccaaactcactcgcggtgcgggcgtaggttttcttgttgccgtgttcgatggaaagcccaccgcccaccaacaggttaaagcccaccagcttgccgttttcggcgatcgccacgaagttcatgtcgttggcgtgcagatcgatatcgttctgtggcgggatcactaccgtggttttgaatttacgcggcaggtaggtctggccgaggatcggttcttcatcagtagtggcgactttttcctggtcgagccagatctccgcatacgcgcgggtacgaggcaacagatgctcagaaatcttcttcgcccactcgtacgcttccgcgtgcagctggctctcgtaagggttgctggtgcagagtacgttacggttcatgtcgttagctgtcgccagcgcatcaagaccgacgctgtgcagcatctggtgcaccggtttgacgttctttttcagaatgccgtggaactgaaacgtctggcggttggtcaggcgaatgctgccatagatggtgttttcaccggcaaatttgtcgatcgcctgccactgtttagtggtaatcaccccacccggcagacgacagcgaagcagcatcgcgtggcgcggctccagcttctgttcagcacgttcggcgcggatgtcgcggtcatcctgctgatacatgccgtggaagcgaatcagcaggaagttgtcgcccttaaagccgccggtcagaccgtcgtttaaatcttccgcaatggtgccgcgcaggtagttgctttcatgcttcatgcgctcggcgtctgtcagttttccttcgaccactaaaggccctggatgtttttcgctcattagtagacatctcgctgataacggcgctctacgcgcagctcacttaaaaattcatccgccgcttcggtgtccatgccaccaaattcggcaatcacttccagaagtgcctgctcaacgtctttcgccatgcgattagcgtcgccgcagacataaatgtgggcaccatcattgatccagcgccacagctccgcgccctgttcgcgcagtttgtcttgtacgtaaactttttctttttgatcgcggctccaggcaagatcgatacgtgtcagcacgccatctttgacgtagcgctgccactccacctggtacaggaagtcttccgtaaagtgcggattaccaaagaacagccagtttttacctggcgcttcgtcggcggcgcgttgctgcataaaggcgcggaacggcgcaataccggtgcctgggccaatcataatcaccggggtttctggattggctggcaggcggaagttatcgttatgttcgataaatacgcggacttcgccctcttcttccacgcggtcagcgaggaagctggaggcaccaccggcacgggcgcggccttccacgtcgtaacgcaccacaccaacggtgacgtgtacttcgttctcgacttccgcctggctggaggcgatggaatacagacgcggcgtcagcgggcgcagcagattaattagcgcttcggcatcaagctgtgccggggagaaacgcaccatgtcaacaatcggcgtcgtcgcggcgtaatgctgtaacttcgctttatcgcccaccagcggcagcagtgtttcactgcgggtaagcgtggcgtaattctcaacaatgttggcggtgttgacggtcagttcgaagtgccactgtagcgcttcgttcagaggcaacgttttgccctcgacggtgacaggttcatcgcctttcagccacagcagttcgacaagttctttcaccagtgccggatcgttctgataccagacgcccagcgcgtcacccggctggtaacgcatgccgctgtcacctaagtcaatttcgatatggcgaacgtctttttcagagttacgcccggtaattttctggttaacagagaggctagccaccagcggcgcgtctttgctgtacgggctggtgtggatttcatttaccgcgccagtagcgacggattggctaggtgccgcgacaggcgcacggcttttaagcgcatcaaccacgcgggcgcgccactcgctggcagcagcctggtattcaacatcggcatcgacacggtcgagcaggcgttcaccacccagttccgccagcttgctgtcgaaatctttcccggactggcagaaaaattcataagagctatcgccgaggctaaacacggcaaacgcggtgttttccagctttggcgcttttttggagaacaggaacttatgcagcgcgacggcttcttccggcggttccccttccccttgcgtactcgtcactacgatgagcagtttttcgctggcgatttgtttgaatttatagtcgcccgcgttcaccagcttaacgttcagttttgctgctaataaatcatcacgtaatgcttcagcaacccggcgcgcattgccggtttggctggcggagataatagttatacccggcatttctgcggctggcgctggcgtcgctgcaagcgcagcaggctgctgattgagtacgccccagaaatagccagaaacccaggcaagctgggtgggagttaaatcggtcgtggccgcctgaaggcgtgccagttgctccgggttcaacggaagcaacgcggaaggtgggacctgtgtcgtcatgcgtcgttatgttccagtaagcaaagctgtttctgcgccctgtcagcgcccataaaacagaagagaaggtaaggttaacggggcaaacggtgtggattaaagacgggatagcgataactaataaccaaatcgactaacctgttttagcaatagtctttaacaacaaaatagattaaccaacctaatgaaaaacaaatgaatttagccaatcattaagataaatcagcgattttgcgcaacaaagtcgttttagataatgcgaaaaaacagcctttccggtactctacggcggttttatcgtcctgtagagaaattatgatgtccaccacgttatttaaagatttcaccttcgaagccgctcaccgcttaccacacgtcccggaagggcataaatgtggtcgcctgcacgggcattcctttatggtgcgactggaaattaccggggaagtcgatccgcatacgggctggattatcgatttcgctgaactaaaagcggcgtttaaaccaacctacgagcgcctcgatcaccattatctcaatgatattccaggtctggaaaacccaaccagcgaggttttagcaaaatggatttgggatcaggttaaacccgttgtgccgctgttaagtgcggtgatggtaaaagaaacctgcaccgcaggttgtatctatcgcggcgaatgataagagtgtgtcggcggtcaatttcccttaagtaacgctatgttagggtgttgtgttctggatatctggggcatgacatggaagacgactgcgacattattattattggtgccggtattgcaggcaccgcttgcgcgttacgctgcgcgcgagcgggtttatccgttttgttactggaacgcgctgaaatccccggcagcaaaaatctttccggcgggcggttatatacccatgcactcgcggaactcctcccgcaatttcatctgaccgcgcctcttgaacgacgcatcactcacgaaagcctttccctgttaacgcccgatggcgtaacgacgttttccagcttacagcccggcggtgaatcctggagtgtattacgtgcacgattcgatccgtggctggttgccgaagccgaaaaagaaggtgtcgaatgcatccccggagcgacggtggatgcactgtatgaagaaaacggcagagtctgtggcgttatttgtggtgacgatattctccgcgcccgttatgtggtgctggcagaaggtgccaacagcgtcctggctgaacgtcacgggttagtgactcgtcctgctggcgaagcgatggcgttggggatcaaagaagtgctgagcctggaaacatccgctattgaagaacgttttcatctggagaataacgaaggcgcagcgttgctgttcagcggcaggatctgtgatgacttacccggcggcgcatttctttatactaatcaacaaacgctcagcttagggattgtttgcccgctctcttcccttacgcaaagtcgtgttccggcaagcgagctgctgactcgctttaaagcgcatccggcagtgcgcccgcttatcaaaaacacggaaagtctggagtatggtgcgcatctggtgccagaaggtggcttgcacagtatgccggtgcaatacgccggtaacggctggctgctggtgggcgatgcgttgcgcagttgcgtcaataccggaatttccgtgcgcggcatggatatggcgctgactggcgcgcaggcggcggcacaaacgctgataagcgcctgccagcaccgcgagccgcaaaatctgtttccgctttatcatcacaacgtagagcgcagcctgctgtgggatgttctacagcgttatcagcatgttccggcgcttttgcaacgcccgggatggtaccgtacgtggcctgcgttaatgcaggatatttcccgcgatttatgggatcagggtgataaacctgttccaccgctgcgccagttattctggcatcatttacgtcgtcacggcctgtggcatctggcgggcgatgttatcaggagtctgcgatgtctgtaacgtaagatgttatcaggagtctgcgatgtctgtagcccgtaatctctggcgcgttgctgatgcgccgcacattgttccggctgactccgttgagcgccagacggcagaacggttgattaacgcctgtccggcaggtctttttagcctcacaccggaaggtaacttacgtattgactatcgcagttgcctggagtgtggcacctgccgtttgctgtgcgacgaaagtacactacaacagtggcgctatccgccttccggattcggcatcacctaccgctttggataaataataaggataatttatgcccctcttacacctgctccgccagaatccggtgattgctgccgttaaagataatgccagcctgcaactggcaatcgattctgaatgccaatttatttccgtgttgtacggcaatatctgcaccatcagtaatatcgttaaaaagattaagaacgccgggaaatatgcttttattcatgttgatttgctggaaggcgcgagtaataaagaagtcgttattcagtttttgaaactggtgaccgaggcggacggcattatcagtaccaaagccagtatgttgaaagcggcaagagcggaaggttttttctgtattcatcgcctgtttattgttgatagtattagctttcacaacattgataagcaagttgcgcaaagcaatccggattgtattgagatcctgccaggctgtatgcccaaagtgctgggctgggtgacagagaaaatccgccaaccgctgattgccggtgggctggtgtgcgatgaagaagatgcgcgtaatgcgattaacgcgggtgtcgtggcgctttccaccacgaataccggggtctggacgttagcgaaaaaattactttgacgggataatcgtaaccaattgaatttggtttgatttgtaggccgcacgccacatccgacattcagcgcctgatgcgacgcttgacgcgtcttatcaggcctacaagtccccaggccagaaccgtaggcaggatcatccggcaacacgttattggcaatctgcgtgaatgtttgtcaccagtgcctccagcaccactttccagtcatcaaccacgccaacatctgcctgactaaataccgcagcgctggcgtcatgattaatcgccaccacaaacttgctattgcgtacgcccgccattaacgctgctgcgccagaagcgccaacaacaatacacacctcaggtgccagcagatgtccggaaataccaatcactttttcagcatcaacgccaccgttcatcactcgcgcccgactgtagcccacttcggctcccagcttttctgccagcatagcgatttcctggttatctgcctctccgccctgccccaccaccagcacccgtctggcctcagctaatgggtcgcgggtaacatttttcagatcctctgtgctaaccagccagtccggaagcgcacccgggacaatgttcagttgttgcattccagagggcaacgtggcgtttttcgctgctcccgcctgacgcgccagggaaaggcatagcgggcgtttttctgtttgcagcgtcgccgttagcgcatttccccagtgggatttgcgcacgcttacggttggaatatctaagctagtcacctggcagatgcttgcaccatgtaaacgccaggccagccgggtgctcagttcatcgccaaacgttcccggcggaaagagaacaacgtccgcaggcgttcgctgccactgttccaccaacgcatccagcacctgttccgccactacaggctgaggttcaatctgccagtgcgccagggtacaaccgctgaaatcctgcgccgccagccagcttgctattgcggcattctcctgatttattgtcacaattgcgatattcatggctgcatcctttggcgtaaatagtcctgccatagcttttgagctttttctgctaccgtttgcccatcaatcagcgtcgctccgcgtcgttgctctgctcttgccagttgcagacactgcatcgctggcatttcggcagcaacagttttacggataatttctgctttccccgcagccattcgctggcgcattcccggtactggcaaggccacttcaccgcactgacgcacggcaatcaccgcaggcaagcgaacccggcaacaacgcaacccatgttcagtacgctgttcgagggtgataaacagcgcgtcgagagtgaaacgctccacctgggtgaagcagggccagcccagcatttccgccagcaaaaatggcgtttgcccattctgcccttcgctgctttggcagccggtaattatcagatccagcggattctgatgctgccattcggcaatatggcgagcgacaaattccggcgcaaagcgcagatctgccgccgtctccagcaatacagcttcctcaaacccaagagccatgagatagcgcagccagtgcaatgcccgttcatcccccatgctcaacgcggttaaagacatcggcgtaccgttttttctctgcgccaacagcagcgcggcagcggcctgttcatcagcaccgagtaaacttcgcagtaggctaatatccggtccgcttttaccctgagccgccgcctgccactctttttccgccagcattccggcatccggttcggctttaaacgctaacagaatgttcattcgcacctcctacatttcccgccgccaccagcgggagggctttagtttctggtgcccatagccaggtcacaacaaaaccaaccaacaacactgtcgccaggagcaataaggtgacttgcattccccactgcgccagcacccacggcagcaggccagtacttaccgccgcgccaagtcgactcatggcagtggcaaaaccgacgcccaggctgcgaatgtcagtaggaaaactttccgcaggcaaaatgcccaccagattactgactgcgctaatggtggtgctgaagagaacaaaaagcagcagcgttaaactactgccggaaggcaaacaggccatgactaccagcgttgccgccagcagcaaaaaacttcccagcaaaaatttgcgatgtgccagcaggtgcgtcagaactaatcccagcagcgcgcccacaattaacaacgcattaagcatcaggctggcagtcagcgcatcttccagaccaatagtctgggcgatagttggcagccaggtataaatcacaaaccatgggattacgaggcagacaaagaagacgctgttaaacgccgtgcgccgccagtaacggctagagaacaaggttttgatgtgtttatgggtcgccgttaccacttcatcgcccagtaaaacatggggaccaaaatagcgatgcacgatagcgtgagcttctgcaaaacgcccctggcgcagtagccagcgtggactttctggcgttccccagcgtaataacgtaatcaacaacgcgggcagagctgcgcttgccagtagccagcgccaggcctccgggttttcggaaataaagtgatgtccggcaatacttgccagcacatagcctacggtccacaccacgctgaatgcgcccagcaaaataccgcgatggcggcgcggggaaaattcagccagcaaggtgtgacctacactataatcgcctcccagaccaatgccaatcaaaatgcgcagtccaataagatgctctggcgtggtggcaaaaaattgtaaaaagctagcaagcgtaatcagcaaaaagctgaaggtgaagattttttgccgaccaatatggtcggagatccacccaagaaccaggctgccaaggaacaaaccaaggagcgcgctgccgccgatcattcccgccataaacggcgtcagttgcatggcgggcgtaagctgaataatggcgtaaccaatgacgccgagaacataaccgtcggtcaggtgtgcgccgaaagtgagcgcagcaatgcggcagtgaaaacggttaagcggtaaatcatccattcgcaccggactagtgttcatctttaccccttcattgtccggtaataagaacggcttctcgcctgagaagccgaaaaggcaacgccccgtcatcgcggaacgctgcctgacacattatttttcaatcggatagatagtacccgtattcataatgccattaggatcgaactgctttttcagcccttccagcaacgcccacgcgctgccgtgttccagtttgctccagtgaacgcgatgtttaccgataccgtggtggtgcaccatgctaccgccgaggcgaatggtttcttcacagatgatcttgttgagcggattgtggtacttgtcgatttcctcttccggcttacagtcaacgacgttgtaatcgtagacgaagtacatgttggtgccgttctgatagctatgagaggaatgaccgcccagcatggtgatgtcgtcggcgtgcgggaactcagtacgaatacggttaataacgctttcgtagatttcgtggatgcagctccagcagccggatacttcggtggtaaagcccatgttgccggttttgaggatctgcacacgttcggcagccactttatccggtccccagttcaggttgttaaaccaggtttcgatcagcttgctgtccacgcgctggcattgcgggtagcgggcaacgatttccgcaatcccttcgcccgtcaccttcgcaatgcgagggttaccttcagccataaagatcagcacgcattttccgtcggcaaaatgggtgaagtgttgggtgccatcttcagcgtcatacaaacgagcgatactcggacgatacccttccaccatgatttcacgcaggatgttgaagccggttttcatgtcttccaggatatagccgtagaagaggttgttttccggggtgaatttaaagattttcactgttacttcagtgatatagcacaatgcaccttcgttgccgatgatgatgtgacgaatgtccgggccagccgcgcggcgtggcacgtttttaatgcgtgtgacggtgccatcagccaatactgcttccagaccaacgaccatatcttcgattgcgccgtagagtgtggagaactgcccgatacttcgggttgctaccaggccgcccatctgcgccagcggcttactctgcggagaatgccccgtggtgtaacctttttcacgcaacgcgttttccagcacttccagcggaacaccacattgcgccgtcgcctgcatattctcaatatcaatattaatgatttgattcatggcggagccgtcgagcaccacgctgttttctacaacagtttccagcccaccttcggtggcggaagcaccggtacgcggcacaccgttaattttgtgcgcattcataaaattcagcacacgggatacttgctctgtggaaccgagttttacgaccgctgccggaatcggcaaagtataaatgccatgaatatccggaaatttacgaaaacggtcaatactgtttttctttaatactgtttcatcggtaattacgcgatctgcaccaacaatttcctttagctggtcgacaatcgctgcgcgagataaagacatagtaattccttcctgataataaaaatggaataatcattaataagagaaaacagaaaccaccgttatgggttagcgcactaaataaccgccatcaaccactaataaatgcccgttgacataattgcttgccggacttgcgaggaatacggctgcgcccattaaatcctgagtatcgccccaacggtttgccggaatatgatcaagaacgcgctgattggtttctggattactgcgtgtcgccagcgtaatatctgttgcataatagccaggggcgataccatttacctgaatattatattgacctagttcatcacaataagctttggtgaacccggcaagagcatgtttagtggcagaatatgcaggactccattgtccacctaagtaagagaacaaactacagatattaataattttgccgcttttctgcgggatcataatttttgcagcttcatagcttaactcgaatgcggcggtcaggttcacatcaatcatcggatcccagtcggcacgaccgaagtccagcaccttattcagcttacaaataccggcattgttaaccagaatatcaactgtaccgaaacgctcacagcaagcagcgataatcttctgcggcgcgccttctgcggtgatacccacctgcatgaagtccacctcaacaccctgtttttcaatcatttcctttgtttcgccgttatctttgacgaaactaggaataaagatatttgcgccagctttggccaacgccatggcaaatgcctggcctaaaccgctattcccaccggtaacaattgcggttttacctttcagggagaaaaaatccatactgaacgcattgagagattcgatactcatagttagctccaatttccgtaaggcaaaaaaaaagaaaggtaacttcccccgcgagagggaagttacctttctcattatctctggtaactggagataatttttagcataagggcataactgctaatgtgatcgtaatcacagtgtgatattcgtattgtcaaataattttaaaaagcagaagcgtgattactctcacacaacacctctgctttccatgttatttattatttcaattactagagacctgagaaaagtaatccacctgaaagggcggcttacttttctcttttttttgtctattacaaatgggaatacgatatgcaacacaacagttatcgccgttggataaccctcgcgataattagttttagcggcggcgttagtttcgacctggcttatttacgttatatttatcaaattcccatggcgaaatttatgggattcagcaataccgagataggtttaataatgagtacctttggtattgcggccattattctttatgcccccagcggcgttattgccgataaatttagtcaccgcaaaatgattacttccgcgatgatcattaccggattactgggtctgttaatggcaacgtatccaccgctgtgggtaatgctctgtattcagatcgcctttgcgataacgacgattttaatgctgtggagcgtgagcattaaagctgcaagcttgcttggcgatcatagcgagcaagggaaaattatgggctggatggaagggctgcgcggcgtcggtgtaatgagcctggcggtgtttaccatgtgggtcttttctcgctttgcaccggatgacagcaccagcctgaaaacggtcattatcatctatagtgtggtttacatcttgttggggattctgtgctggttttttgttagcgataacaacaacctgcgcagtgccaataacgaagaaaaacagagtttccagcttagcgacatcctggccgttttgcgtatcagcaccacctggtattgcagcatggtgatttttggcgtcttcaccatctacgccattctgagttactccaccaactatctgaccgaaatgtatggcatgagcctggtggcggcgagctacatggggattgtgatcaacaaaatattccgcgcgctgtgcggcccacttggcggcataatcaccacctacagcaaagtgaaatcccctacccgcgtgatccaaatcctttccgtactcggcctgctgacgttaactgccctgctcgtcacgaactctaacccgcaaagcgtcgcgatggggattggcctgattttactgctgggattcacctgttacgccagtcgcgggctgtactgggcctgccctggcgaagcgagaacaccgtcttacattatgggcaccacggtaggtatttgtagcgtgattggattcctgccggatgtcttcgtttacccaattatcggccactggcaagacaccctgcccgctgcagaagcctaccgcaatatgtggctgatgggcatggcggcgcttggcatggtgattgtctttacctttttgctgttccaaaaaattcgtactgctgatagcgcccccgcaatggctagcagcaagtaagccaggaaaattacaggagaaaaatcatgagcaaaaaatacatcatagggattgatggcggaagtcagagcacaaaagtggtgatgtacgatctggaaggtaacgtggtttgcgaaggcaaaggcttattacagccgatgcacacgccagatgccgatactgcagaacatcctgacgacgatttatgggcaagtttatgttttgccggtcacgatttgatgagtcagtttgccgggaataaagaagatattgtcggtattggtctgggatccatccgttgctgccgtgcgttattgaaagccgatggcacgcctgctgcgccgttgattagctggcaggatgcacgcgttacacgcccttacgaacacactaaccctgacgtggcatatgtcacctcttttagcggttatctgacgcatcgcttaaccggcgagtttaaagacaatatcgccaactattttggtcagtggccggtggattataagagctgggcatggagcgaagatgctgcggtaatggataagtttaatatcccccgtcatatgctgtttgatgtgcaaatgcctggcaccgtcctcggacatatcacaccacaagccgcactggcgacacatttcccggcaggactgccggttgtttgtaccaccagtgataaaccggtagaagctctgggggccggattactggatgatgaaacggcggtaatttctcttggcacttacatcgcattgatgatgaacggcaaagcactgccgaaagatccagtagcgtactggccgattatgtcttctattccgcaaacattgctgtatgaaggttacggtattcgcaaaggcatgtggacggtgagctggctgcgcgacatgctaggcgagagcttaattcaggatgccagggcgcaggatcttagtccggaagatttactcaacaaaaaagcttcttgtgtgccgccaggctgtaatggtctgatgacggtgctggactggctgaccaatccgtgggaaccgtacaaacgcgggattatgatcggctttgattccagcatggattacgcatggatatatcgtagcatactggaaagcgtggcgctgacgctgaagaacaattacgacaatatgtgtaatgaaatgaatcactttgcgaagcatgtgatcattactggcggcggtagcaacagcgatctgtttatgcagatttttgccgacgtgttcaaccttccggcacgacgtaacgccattaacggttgtgcaagcctgggggcagcgattaatacagcggtaggtctggggctatacccggattacgcaacggctgtcgataacatggttcgcgtgaaagatatctttataccgattgagagcaatgccaaacgctacgacgcgatgaataaaggcattttcaaagacctaaccaaacatactgatgtgatcctgaaaaaaagctatgaagtgatgcatggggaattggggaatgtggatagcatccagagctggagcaatgcgtaagtgaggaaggccgggcgggaaactgcccggcctgaacatacctgaatggttatccccgctgacgcggggaacataagttcgacaacttaaaaaatgataacaagtccggtttatccccgctgatgcagggaacataataaaaactttaactagttcggtttatccctgtttttacaaggaatattaactacactcgatgtctttagaataaaagacaatacgaatcgcactttatcaattttcacttaaagtatgaactggatatctttattcataagaactattcatcaacagcgtatagaggcggttatgtaaaaccactcattagcctcaaaacaaagacaaacttccagatttattacttaaccaatgaataacaagcttaaaaaatatactgttattctaaagaaaaaattaacaggcattaattcaatattaaaaaaataatagattaaaatttcttaacgatttaagaatcatacaaataacactttgattaaatttaattttttgtatcgataattgtgaacctctctggcatggagaactattttgaacatgaggtgttacgtggatatgttgcttattacaagtactgctaatataaaaacttgagaaagagataacgggttatatggtggtttatccccgctggcgcggggaactcgacagaacggcctcagtagtctcgtcaggctccggtttatccccgctggcgcggggaacacctgttttcgcaaatctatggactattgctattcggtttatccccgctggcgcggggaacacgggcgcacggaatacaaagccgtgtatctgctcggtttatccccgctggcgcggggaacactggctctgcaacagcagcacccatgaccacgtcggtttatccccgctggcgcggggaacacgaaatgctggtgagcgttaatgccgcaaacacaggtttatccccgctggcgcggggaacacattacgcctttttgcgattgcccggtttttgccggtttatccccgctggcgcggggaacactctaaacataacctattattaattaatgattttttaagccagtcacaatctaccaactttatagtatcacacaaacaacacatccattatgttaaagagcacttaatccattgattaaaaaggtaaatatttaaaataactctatacaaactaaaatctaccaaactttaccgcaataattttcactccagcgaaaaattaatgccacagaatttgtagagaatgctaatgattagccctggatgggtaaaatggaggagttttcagaggcgacaaacaatataaatgagtagaagtctttacaggttccacccatttataacgcttataaatgtttaatcaggcaatatttagatatttatgtgtttgcatgctcaaacgccaattacgcgcaatgcaggtttcaatgcacaaacgtgtggcatcatccttttggctaatcggctgcagtgcaatgactcgcggtttatcatcggtcagcgttgccagtagttcatccagtgcttcaatatcgcgtacgcgccccactggatgcttgatttcgttggctcgctccagtgcctgactcaacacttcatagccgccgcgcatgttcagctttgggcttacggtaacccaggtattcggtgtgcagcgtacctcatgagtaccactggtttcgatctggcagctaaaaccgttcttttcgagcagatcagtcagtggcagcaaatcatgaatgcaaggctcaccacccgtaatcaccacatgccgcgcggtgtatccctggcgaccaatgacagccagcaaatcttcactgctcgcagccccccacttatcactctctttggtcttcgccagaatgctgaaaagggagacttcccgatcctcaagcttttcccaggtgtgtttggtgtcgcaccaggcacagccaaccgggcatccctgtaaacgaataaaaatggcgggaacgccggtaaagtaaccctcaccttgcagggtctggaacatctcgttaatcgggtactgcatagcattctctgtgaagtggataattgttaattattgcagatcctgccacaacaatcatgtcttattaacattctgttacaggcaggtttaaagaaaaatgcgaaacatatcgttaataattaaagggagtaacgtattatgtcagaagaaaataaagaaaatggatttaatcatgtcaaaacattcaccaaaattatatttattttttctgtattagtttttaatgataacgaatataaaattaccgatgccgccgtcaatttatttatccagatttaatgagaaatttataatgcgctatttcatactaatgttcactttcgtatgttcctttgttgcagcccaaccaactattgtcccacaattacagcaacaagttacggatcttacgagtagcttaaacagtcaagaaaagaaagaactgacgcacaagttagaatctattttcaataatacccaagtgcaaattgccgtattaattgttcccacaaccaaagacgagacaattgaacaatatgctacaagagtttttgacaattggcgtttaggagatgccaaacgtaatgatgggatactgatcgttgttgcctggagcgatcgcactgtccgcatccaggtaggttatgggctggaagaaaaggtaaccgatgctctggctggagatatcatccgtagcaacatgatacccgcatttaaacaacaaaaattagctaagggattagagctagctataaacgctttgaataaccaactcactagtcaacaccaatatccgactaatcctagtgaaagtgaaagtgcgtcttccagtgatcattattactttgctattttttgggtatttgcagtgatgttcttccctttctggttttttcatcaaggcagtaatttttgtcgcgcatgtaaaagtggagtctgtattagtgcaatctatcttttagatttattcctgttctccgataaaattttttccattgctgtattttccttcttttttactttcaccatatttatggtctttacctgtttatgtgtacttcagaaaagagcatctggtagaagttatcatagtgacaacagcggttccgctggaggcagtgatagcggcggatttagcggcgggggcggttcttctggaggtggcggcgcatccggccgctggtaactcaaccataaaaaatgccagcccggaggctggcatttttaaatcagataaagtcagtcttatgcctggcctttgatctctttacgaccgttgtacggtgctttttcgcccagagcttcttcgatacgaatcagctggttgtatttagcaacacggtcagaacggctcatagaaccagttttgatctggcctgcagcagtaccaacagccaggtcagcgatggtagcgtcttcagtttcgccagaacggtgagagataactgcagtgtagccagcatctttcgccatcttgattgcagccagagtttcggtcagagaaccgatctggttgaatttgatcaggatggagttagcgatacctttttcgataccttctttcaggatcttggtgttggttacgaacaggtcgtcaccaaccagctggattttgtcgcccagaactttggtctggtatgcgaaaccgtcccagtcagattcgtccagaccgtcttcgatagaaacgatcgggtactgtttggtcagttcttccaggaagtgagtgaattcttcagaggtgaacgctttgttgccttcgccagccagaacgtatttaccatctttgtagaattcagaagctgcgcagtccatcgccaaagtgatgtctttgcccagttcataaccagcagctttaacagcttcagcgataacagccagagcttcagcgttggaacccaggttcggcgcatagccaccttcgtcaccaacagcagtgttcatgcctttcgctttcagaacttttgccaggtgatggaaaacttcagaacccatgcggatggcttctttcacagttttcgcgccaaccggctgaatcatgaattcctggatatcaacgttgttgtcagcgtgctcaccaccgttgatgatgttcatcatcggaaccggcatagagtatttgcccggagtaccgttcagttcagcgatgtgctcgtacagcggcatacctttagcagctgcagcagctttggcgttagccagagatacagccaggattgcgttcgcgccgaatttggatttgttttcggtgccgtccaggtcgatcatgatcttgtcaatgccagcctgatctttagcatctttgccaatcagcgcctgagcgatcgggccgtttaccgcagcaacagctttggttacgcctttacccaggaaacgggatttgtcgccatcgcgcagttccagagcttcacgggaaccagtagaagcaccactcggagcagctgccataccgacgaaaccaccctccagatgtacttcggcttcaacagtcgggttaccacgggagtcgatgatttcacgaccgatgatttttacgattttggacattaggttttcctcaagtcactagttaaactgaaactccagacaaacaacgcgtacccagggtacgcgttgccgctctaacttttttacttacttcgcctgacgtttctggaactcgctggcggctttcacaaagcctgcaaacagcgggtgaccatcacgtggagtagaagtaaactccggatggaactggcaagccacgaaccacgggtgattcggaacttcgatgatctcgaccaactgatcatccccggaacggcccgcaacgcgcagacctgcatcttcaatctgtttcaacagcatgttgttgacttcgtaacggtgacgatgacgctcaacaattgtcggcgcattgtacagctggcgaaccaggctatcgtcaaccaactggcactgctgtgcgccgagacgcatggtaccgccgagatcgctcttctcgctacgaacttcaacgttgccgttttcatcgcgccactcggtaatcagcgccacaaccgggtacttacagtctggcacaaattccgtagagttggcgttctccatgttggcaacatggcgagcgtaatcaattaacgccacctgcatacccaggcaaatgcccagataaggaatattgttctcacgcgcaaaacgcgcggtcgtaatcatgccttctacgccacgatagccgaaaccgccaggtacgaggattgcgtccagacctttaaggatttcaacgccgcgcgtttcaacatcttgactatcgatcagtttgatgttgacgctgacacgattcttcagcccaccgtgtttcagtgcttcgatcacacttttataagcatccggcagttcaatgtacttgccgaccataccgatggtgacttcacttaccgggttcgcttcttcgaagataacctgttcccattcggacagattcgcttccgggcagtttaagctgaatcgtttacaaatataatcgtccagcccctgagatttcaacaggcccggaattttatagatggaatcgacgtctttcagagaaataaccgctttttccggaacattacagaacaatgcaatcttcgcacgttcgttcgccggaacagcgcgatcactacgacaaatcaggatgtcaggctggataccgatggagagcagctcttttacagagtgctgagtcggtttggttttgacttcaccagacgctgccatgtacggcaccagcgtcaggtgcataaacagagtgtgctcacggccaatttcaacagccatctggcgaatcgcttcgaggaacggcaaggattcgatatcacctactgtaccgccgatttctaccagtactacgtcatgaccttcgccaccttccagcacgcgctctttgattgcgttagtgatgtgcggaataacctgcacggttgcgccgaggtagtcaccgcggcgttctttacgcagaacgtcagagtagatacgacccgtggtgaagttgttgcggcggctcattttggtacgaatgaaacgctcgtagtgccccaggtccaggtcggtttcagcgccgtcttcagtaacgaacacttccccgtgttggattgggctcatagtacctggatcgacgttgatgtacggatccagtttcatgatggtcacattgaggccacgggcttcaagaatggctgcgagggaggctgcggcaatgcctttacccagagaggatacgaccccgccggtcacaaaaatatagttcgttgtcatgctgaacctgagaagttaggttgaaaagacgatggaataaccaagacgggaaagcagtatacccgaacatgacctgtgccacaaactttcattatccctcctcttcgccagcgcactattgaaatcaggagtgagaaaatagcccctttggggtaaatgtttttgacgcaaatcaagcgcttgtcatttaaaaaatgacacaaatggcgcttgaccgcgtaattcccttagagatcaatttcctgccgttttacctgttgccagacttcttccattgtttcgaggtcaacacctgtcatttccagtccacgcgcggcaacaatacgctccacttcgcgaaaacgacgctcgaatttttcgttcgctttttgcaatgcgatttctgctttcgtccctaaatggcgagccagattaaccgtggcaaacagcaggtcccccatttcctcctccagtttagcctggtcgacaacagcctgccgcgcttcgtacatcacctcgtcgatctcttcgtagactttatcgactaccggaccaagcgtcgtccaatcgaagccaacgttggcgcaacgtttctggattttttgcgcacgcattaaagccggtaaactacgaggaatatcgtccagcgcgctatgctgcgctttctgcgcgcgctcttcggttttgatttgctcccaacgggcaagcacttcactactgttttcggcagaactatcagcaaaaacatgcggatggcgacgctctaatttatcgctaatagcagcgcaaatatcattaaagtcaaagcgcccttcttcctgagccatttgcgcgtaaaacaccacctggaatagcagatcgcccagttcaccgcgaagatcgtcaaaatcttcacgggcgatggcgtccagcacttcgtaggtttcttcaagggtgtaaggcgcaatggtggcaaatgtctgctctttatcccacgggcagccgttttccggatcgcgcaggcgctgcataatagtgagcaaacggtcgatttgattcattgaattgtcctgaaaattgcgggtctgtcaggtggaaacctgtgaccagaatagaagtgagttagtaacattacccaatcagtacgttaattttggctttaatgagttgtaattcctctggggcaactgttcctttcttcgttgctcctcttgcccgccaggcgatactttttacctgatcagctaacgctacgccatcacgttcctgaccggataaaacaacttcgaacggatatcctttactttgcgttgtacaaggaacacacagacacatacctgttttgttgttgtacatgaaaggactcaggacaacagctggacgatgtccagcttgctcgctaccttttgtcgggtcaaaatcaacccaaatcagatcgcccatatcgggtacgtatcggcttaccattaccagacttccttatctttcggctctccccagtcgatattctcgtggaggttttccggcgtgatgtcgttgaccagttcagcaagcgtaaatacgggctctttacgcactggctcaataattaatttgccatccaccaggtcaatcttcacttcatcatcaatattcagattgagcgcctgcattaacgtagccgggatccgcaccgccggactatttccccaacgctttacgctactgtggatcataaccctttcctcaaaccgctatcatatgtagatacagtatatatcaatctacattgtagatacgagcaaatttcggcttaactcccgtgcaaccgacgcgcgtcgataacatccggcacctggttgagtttacccagcacgcgccccagcacttgcaggttgtaaatctcaatggtcatgtcgatggtcgccagttgctgtttggtgtcgctacggctggcaacgccaagcacgttcaccttctcgttggcgagaatggtcgtgatatcacgtaacaacccactacgatcattagctaccacgcggaccaccaggctatatccggcggagtagctctcaccccataccgcgtcaacaatgcgttctggcgcatgggagcgcagttccgccagttgttcgcaatcggcgcggtgtacactaataccgcgcccctgggtaatgaagccgacaatctcatctccaggaatcggctggcagcagcgcgcgatgtggtgcatcaggttgccaacaccttcgactaccacgcgaccgttatctttactgcggttttgcggcgtgtagcttttttgctgaagttgcttcagcgcggcggcgtcctgctcttcggcactcggcttattaaattggctttgcaggaagttcaccatctgattgagacggatatccccgccaccaatcgccgccagcaactcgtcgacatcattgaagttgtaacgcggcagcagatgtttttctgcttctttcaggctgatccccagatgttccagctcgtcgtcaaggatttgccgcccagccagaatgtttttgtcacggtcctgtttacggaaccaggcgtgaattttgctacgcccacggctggttgtgacgtaaccgaggtttgggtttaaccagtcacggctggggttcggctgtttctgggtgataatttcaatctggtcgcccatctgcagctggtaggtgaacggcacaatgcgcccgccaatttttgccccgatgcagcggtgtccgacatcactgtggatgtggtaagcgaagtccagcggcgtacttcccgcaggcaaatcaacgacatcacctttcggcgtaaagacgtacacccggtcgtcaaagacctgactacgtacttcgtcgagcatttcgccggaatcagccatctcttcctgccacgcaatcagtttacgcagccaggcaatccggtcttcatgtccgctacgtgcgccgccagcagccgcgccctctttatatttccagtgcgcagcaacacccaactctgcatcttcatgcatctgtttggtgcggatttggatctcaacggtttttccacccggccccagaaccacggtatgaatagactgataaccgtttggtttcgggttagcgacgtaatcgtcaaactcatccggcaggtggcgatagtgagtgtgcactatccccagtgcggcatagcaatcctgtaaacgctcggcgacaatacgtaccgcacgcacatcaaacagctcatcaaaggcgaggttctttttctgcattttacgccagatgctgtagatgtgtttcggacgaccatacacttccgctttaacgccttcagctttcatctcagcgcgcagatgaccaacgaactcttcgatgtagtgttcgcggtcgagacgccgttcatgcagcagtttggcaattcgtttgtattcggttggatggaggtaacggaagcagtaatcttccagttcccatttcagttgtccgattccgagacggttagccagcggtgcgtagatgttggtacactcttttgccgccagtacacgttcatcttccggcgcatcttttacttcgcgcagatgagcaatacgctccgccagtttgatgactacgcagcgaaaatcatcgaccatcgccaataacatccggcgaacgttatcgacctgttcggaggaaacagaatcagtgtgcgtcgctttcagctggcggatcgccgccatatcacgcacgccgtgaataaggttaacgacgctcttaccgacgctctcacgcagcacatcttcgctgactacgttggcatccgccagagggaaaagcagcgccgcccgcagcgtgtcaatgtccatacttaatgtgctgaggatctccaccatctcaacaccacgccacaataacagactggcatccggatgcccctgcgtctgttgcagacaatacgcccaggtttcggctaagcactcacagctcttctggctggtaatacccagacttgcgatccatttttccggatcaaattcaccagccttattgatatgtgcacttcttaccgcaaccatcgtcctctcctttagggaccagacctgccgaaatcggcaaatcgcaattatttaacgcggctgaaaagtaccatgctttccagatgtcccgtgtgtgggaacatatccagcatcgccagtcgcgcaatggtatatcctgcttttaataacgcttcgctatcccgagccagcgttgcagggttacaggatacataaactatacgaataggttccagttttataatttgctgcataacacctgcggcacctgctcgcgccgggtccagcaacactttatcgaagccgtttttcgcccacggctgctttgtgacatcttcttcaagattttcgtgataaaacgtcacattctgtaagccattaagacgcgcattctgctggcctttttccaccagcgccggaacaccttctacaccgaccacactggcagcttgtgtcgccaatggcagtgtaaagttgcccataccgcagaacagatccagtacgcgatcttcaggttgcacatccagccattccaacgcacgcgctaccattttttggttcacacccgcattgacctgaataaaatcgcgcgggctaaaagttaagcgcaacccgttactgtcataccagggcatctcaccagagacggtttcgagtatctcactatcgggggcgagatacagatccaggccttcagaatggctaaagcgttccagtttttcgcgatctgcgctacttagcggtgcggtatggcgcaaaatcatcagcgtgccgctggttgcctgtaccagttcaacatgaccaagatggcgcatagcttgtaagctgcccagacatgccctgactttgggcagcaatgcttcaagttggggcgctaaaatggggcattgtttgacgtcgacaatgtcactggagcccgctttgcgaaaccccatctgaagttgctgtgttttcggtaagtagttcagacttaaacgcgcgcgacggcgatagccccagggaacatcggcgatcacttcagagacatcgtgtttcattaatcgggcgagtgccgcacttttgcttcgctgctgtaaatccacgctggcgtgttgttgctgacagccaccgcatacgccaaaatgaggacagcgtggcgtttcgcgttccgggctatcgcttaaccggcgtacgactttagcgcgggcatactgttttttatcttcagtaacagtaacttccgcgttttcctgcggcaataatccggggataaatagcgttttgccgttatgtcgcgccacgccctgaccaaaagagtcgaggtcgttgacactaacggttatgatctgacgcgtcgtcgtgcgtcgttttgcagagtagaattgcgccattggcgagactttctcaatttaacagtgtgaccttaattgtcccataacggaactccatgaccaactacagcctgcgcgcacgcatgatgattctgatcctggcaccgaccgtccttattggtttattgctgagtatctttttcgtcgtgcatcgctataacgacttgcagcgtcaactggaagatgccggtgccagcattattgagccgcttgcagtttctactgaatatggcatgagcctgcaaaatcgcgaatctatcggtcagttaataagcgtactgcatcgtcgccattccgatattgttcgcgcgattagcgtttatgatgaaaataaccgactctttgtcacctccaattttcatcttgatcccagtagtatgcagctcggcagcaacgtgccgtttcctcgccagctcactgtcactcgtgacggcgatattatgatcctccgcacgccgattatttctgagagttactcccccgacgaaagccccagtagcgatgccaaaaatagtcaaaatatgttgggatatattgcgctggagctggatcttaaaagcgttcgcttgcagcaatataaagagatctttatttccagcgtgatgatgctgttttgtatcggtattgcgcttatttttggctggcgcttaatgcgcgatgtaaccggtccgattcgcaacatggtgaataccgtcgaccgcatccgtcgcgggcaactcgacagccgggtggaaggatttatgctcggcgagctggatatgctgaaaaacggtatcaacagcatggcaatgagcctggctgcttatcacgaagagatgcagcacaatatcgaccaggcgacgtccgatctgcgtgaaacgctggagcagatggaaattcagaacgttgagttagatctggcgaaaaagcgcgcccaggaagcggcgcgtattaaatccgagtttctggcaaatatgagtcacgagctgcgtacaccactgaatggtgttattggctttacccgcctgacgctgaaaacagaattaacaccaacgcagcgcgatcacctgaatacgattgaacgtagcgcaaataatttgctggcaattattaatgatgttctcgacttcagcaaactggaagcaggtaagctgattctggaaagtattccattcccactacgcagcacgctggatgaagtcgttactctgctggcacattcttctcacgataaagggttagaactgacgctcaatattaaaagcgacgtgcctgataacgtgatcggcgacccgctgcgattacagcaaatcatcactaacctggtggggaatgcaattaaattcaccgagaatggcaacattgatattctggtagaaaaacgtgcgctgagtaataccaaagtgcagattgaagtgcagattcgggataccggcattggtattcctgaacgcgatcaaagccgcttattccaggccttccgacaggctgatgccagtatttcccgccgtcatggtggcaccgggctggggctggtgattacacaaaaactggttaatgaaatgggcggcgatattagcttccatagccagccgaatcgcggtagtactttctggttccacattaatctcgatctgaacccgaacattattatcgaagggccatccacccagtgcctcgcaggtaagcgcctggcctatgtcgaaccaaactccgcagcagcgcaatgcacgctggatattttaagtgaaacgccgctggaagtggtttatagcccaacgttctccgcgctgcctcccgcgcattacgacatgatgttgttaggcatcgcggtgaccttccgcgagccgctaacaatgcaacatgagcgattagcgaaagcggtaagcatgaccgatttcctgatgctggcacttccttgccatgcacaagtcaatgctgaaaaactcaagcaagatggtatcggcgcgtgtctgctgaaaccattaacacctacacgcctgttgcctgccctgacggaattttgtcatcacaaacaaaacacgcttttgcctgtaaccgatgaaagtaagctggcaatgacagtcatggcggttgatgacaaccccgctaacctgaaacttatcggcgcattgctggaagatatggtgcaacatgtggaactttgcgatagcgggcatcaggcggttgaacgggcgaaacagatgccgttcgatttgatcttaatggatattcaaatgccggacatggatggcattcgggcctgcgaactcatccaccaactcccgcatcagcaacaaacgccggttatcgcggtaacggcgcatgcaatggccgggcaaaaagagaagctgcttggcgcagggatgagcgattatctggcgaaaccgattgaagaagagcgattgcataatttgttgttgcgctacaagcctggcagcggtatttcctctcgcgtcgtgacgcccgaagtcaacgaaattgtggtgaacccgaatgcgaccctcgactggcaactggcactacgccaggcagcaggaaaaaccgatttagcgcgcgatatgctgcaaatgttactcgatttcctgcctgaagttcgcaacaaagttgaggaacagctggttggagaaaacccggaaggcctggttgatttgattcataaactgcatggcagttgcggctatagcggtgtgccacgtatgaagaatctctgccaactgatcgaacaacagctacgtagcggtactaaagaagaagatttggaaccggagctgctggaactgttggacgagatggataatgtcgcgcgcgaagccagcaaaattctcgggtaatggatgtcttgtcgagtagcaatcggctttttatgacgctggtttcagattggtgacaaagtgcctgtgtttatgccggatgcggcgttaacgccttatccggcctacaaaaccaattaaattcaatgaattaaaaaatgatgtagacctgatacatagcacaacaggctattttgcgtttagcatcagtctcaaaccggctccagatagagccggttttggttttctgtcttaacgcaccatgcacgggcgcttgttatcgaacgtccagccaggaatcagatactgcattcccatcgcatcgtcacgcgcgccaagcccgtgtttctgatacagctcatgggctttcatcacttgatccatatcgatttctacacccagccccggtttttctggcacctgtaccagcccgcctttgatctcaaacggttctttggtcaggcgctgattgccttcctgccaaatccagtgcgtatcaatagcagtaattttacccggtgcagcggcggcaacatgggtaaacatcgccagggaaatatcgaagtggttgttagagtgactaccccaggtcaggccaaattcatggcacatttgcgccacacgtacgctaccttgcattgtccagaaatgcggatccgccagcgggatatcaacggattgcagggagagcgtatggcccatttgccgccagtcggtggcgatcatattggttgcagtcggtagacctgtcgcgcgacggaactctgccatcacttcacgcccggagaaaccttgctccgcaccacacggatcttctgcataagccaggctacctttcaggtatttaccgattttaatcgcttcgttcaggctccaggcaccgttaggatcgagcgtaatacgcgcctgcgggaagcgttgcgccagtgccacaatagactcggcctcttcttccccggccagtacaccgcccttcagtttgaaatcgttgaagccatatttttcatatgccgcttccgccaggcgcaccaccgcatccggcgtcatcgcttcttcatgacgcaggcgataccagtcgcaactgtcatccggctggctttgatacggcagcggcgtggctttgcgattaccgacgaagaacagataaccgagcatttcgacttcgctacgctgttgaccatcgcccagcaggcttgccacgtttacccccagatgctgccccagcagatccagcattgccgcttctatcccggtaactacatgaatagtggtacgtaggtcaaatgtctgcaaaccgcgcccaccagcatcacgatcggcaaaagtattacgcaccagcgtcagaacgtttttgtattcacccagcgttttacctaccaccagcggaatcgcatcttccagcgttttacggattttctcgccgccgggaatttcccctacgccagtgtgaccagaattatctttgataatcacaatattacgcgtaaagaacggtgcgtgtgcaccactcagattcatcagcatactgtcatgacccgccaccgggataacctgcatttcagtaacaacaggcgtcgtaaattgagaactcatatttatgtcctttttcagaatcaatgacggccgaaaacgggacgtttacggtcaaaggtccagccggggatcaggtactgcatcggacctgcgtcgttacgcgcaccgccaggcagacgtttataggcctcatgtgccttttgtacctgttcccagtccagttccacgcccagaccgggcgcatcaggaacggcaatttttccgtttttaatctccagcggattttgggtcaggcgacaatcgccctcctgccaaatccagtgggtatcgatagcggtaggattacccggtgccgccgcgcccacatgggtaaacatcgccagagagatatcgaaatggttattagaatggcagccccaggtcagcccccagtcgtcgcaaagctgcgccacacggactgcaccggaaagcgtccagaagtgcggatcggcaagtggaatatctaccgcattgagcatcaccgcatgacccatttcgcgccagttggtggcgatcatgttagtcgcgacgggcaagccggtcgcccgtcgaaattccgccatcacttcacgtccggagaagccctgttctgcgccgcatggatcttcggcataggtaagaacatcattcagccctttgcataaagaaatggcttcatcaagcagccatgcaccgttgggatcaacggtaatccgcgcatccgggaagcgtttcttcaatgcacgaacagtgtcgatttcttgctcgccaggtaacacgccgcccttaagtttgaaatctttaaagccgtagcgatcctgactggcttccgccagacgcacaacggcttcgctgttcattgctttctgatgccgcaactgataccactcatggttgcccggcgtattttccacataaggaagatcggttttggtccgatcaccgatataaaacagataaccgaggacggtaatagcctcgcgttgcttgcctggccctaacagttcgcagaccggaacattcagcgccttacctagcaggtcaagcaaagcggcttccagcgccgccacggcgttaacgcgtaattcaaaggtccaggcacctttaccgaaggtatcaaaatcggcggcctgattacctttatgcacctgctggaccactttattcagtcgcgcaacttcctggcccagaaccatcggaatagcatcgacaagcgtctgataaatcacatctccgcccggcgcttcaccaatgccggtatgcccggcgttatcggtgagtaccacaatattgcgggtgaaatatgcgttatgtgccccaccaatattaagcaacatgctgtcatgcccggccaccggaatgactttcatatcagtaataacaggactggattgtgtcgccatcttattgccccgcaacaggtttcaactcgatacgcttgatatcgcccaccagcaccaggtagctcagtaccgcgattaaggcatgaacaccaacataaatcagcgccccattaaagctgccagtcgtgccaacgatataaccaattgcgattggcgtgacgatgccagaaatgttaccgaacatgttgaacaggccaccggaaagaccgctgatctcttttggcgcggtatctgccattactgcccaacccagcgccccgatgcccttaccgaagaaggccagcgccataaagccgatgatcatccactcaacgttgacgtagttgcagaacaccatcaccatgctcagcaacatgcccattacgatcggtgttttacgcgcaatgttcaggcttcccgtgcggcgcatcagccagtcggaaataatcccacccagcacaccgccgataaaaccgcaaaccgccggaacggaagccacaaagcccgctttcagaatgctcatcccgcgtgcctgcaccagataaaccgggaaccaggtaataaagaagtaagtcagggcgttgatacagtactgaccgatataaacgccgatcatcatccgactccctagcagctgtttgatctgcccccacttcacgctgaacggcactttaactttggtgttttgctgatccatattgatcagcgcaccacccgcggcgatgtactccagctctttcttatttacccccggatgttgatttggctcgtggatgactttcaaccagataaagctgatgacaatccccagaccgcccataaagaagaagacgtgactccagcccacttcatgcgtcagccagcccataatcggcgcgaagatcaccgttgcgaagtattgagcggagttaaaaatgctcaccgccgttcccctttcctgcgccggaaaccaggccgcaacaatgcgactgttgccggggaaagatggcgcttcagcaagcccgaccaggaagcgcagcgtaaacagggcaacgataatgccgaatccactaaagatatcgacgaagccttgcagcaaggtaaacatgctccagataaagatgctccagaagtagacgcgtttactaccaaaacggtccagcaaccagccaccagggatctgcccgataacataagcccaactgaaagcagagaacacatagcccattcccacgggatcaaggccgatatctttggccatttcgctaccggcgatagagagcgtagcgcggtcgccgtagttgaaggatgtgacgataaacaacatcaccactatccagtaacgagcatttgtgcgtttttccacactgctcgcagcctgacttaaagaactcattgttgcactcctgaaaattcgcgttagccacgctcactctggactgcgacatcgccaggaaatcagaggtgacgtagggtgttttttgccgtttttataggtcgttcgccgaatacggcgcgtgtttatatctggcaatagcagtataaaaagcgcgccatagcggctcaccgtgcaacaacacaacattaatgcgttcaatgaggcccgattttggcattagccctggacggtggaatccacttcacggaaatgaaaacaagaacaagaaaggaagggttaaaacgaagaaataaagaagagtatgaaatggatcgcttgactccaggcaaacgccagtaaaaatccgcgctatgaagcagtttttactggcatttgcctgaaaagattcgattcagcaccgctaaaacgacatttaccgctcgctgaacatatcaggacaacagcgtgccccactgttcgacccacggattactttccgtttccggttccgggttctcactggcgtcaatcaacagcatttcgccaacccgctgagcgctctgttcctgcaacaaggcatcgaactgtttgccgccattgcagaaattcacataactactgtcgccgagcgcaatcacgccataacgcagattcggctggaagcccagactatctttgattccctgaaagagtggcacaatgctatcaggaaggtcgccctgcccggtcgtggacgtaaccaccagaacatacttatcctgatagggcagccagtcgcttaattcaggatcttcaaataccgttgctttgtggccctgcgcggtcagaatcgcttccgcttcttcggccactaacagactattcccgtacatggtgccgacaaaaataccaatttccgccataccgttttctccctggattaggaacttatctctccatcctgaccgcttggcgcactgaactcaaccctttcattttcaggaagcagaccgcgccagccaaattgacttaacgcctgcatccaggtgtcgtccaggcccgcgtgaatagtcagcggctcgccagtaaaaggatgcgtcaaactcaactgactggcatgtagcattaaccgctggaggccaaaatgctcagcaccgctgcgattctggcgtaaatcgccatgtttgctatcgccaataatcggatgacgcaaatgggcaagatgtcggcgaagctgatgtttgcgtccggttttcggctccagttccaccaggccgtagcgcgtggtcgggtaacgtccggtcgctaccggcatttctacggtcgccagaccgcgataatgcgtcactgctggctgcgggcctttatcttcgcgggcaaatttatcagcgattttgtccagttcttccaccagtggataatccagcaccgcttcttccatcaaccagccgcgcacaatcgcatggtaacgtttctggatttggtgctgttcaaactgttgtgccagcagccgtccggcctcgctggataatcccatcaacaacacaccagaagtgggtcggtccagacgatgagcagtaaaaacatgctggcctatctggtcacgcacggtttgcatgaccactactttctcgtcgcgatccagccagctgcggtgaaccagccagccggagggtttatttaccgcaaccagccattcatcctgatagagtatttccagcattagctcgcatcatccgcaaaaagagcatccagtttttccagctcagccagaataagcgcgcgttgcggatggtccgtcgccagcgccatttcataatagggtgcaacggcaaaagcgcccggtaacggctgtttgttatctaacaaatcgtgcattcgcgggatcagcacccactgcaaccactccagtggttccatggtgtccataaagaacggttgggtactattaaattgatgcggctggggttcatcgtttcgccagtgctgatgttcacgcagtaacgcttcaagcgcctgcaactggagacgaacgcggtcatgagtggtcataaagcaacctcaataagaaaaactgccgcgaaggatagcaggaataaaaaaagggagcactgtattcacagcgctcccggttcgtttcgcagcattccagctacttttgttgctccctgctcatccttgacaacttttcctctggccttgcggccaatcgttcatcctgaactattgcttcctgctcacaccaccccgatgtgatacttcatcctgaagtgtccctggccttcctgacccaccgaatcatcctgaccggttctcattctccatcctggaggtgtcctttaacgcgtcctgcgtcatcctcttcgcttcatccagaagcctttccctgaaacaccatcctggtgtgtcctgcagaagtgtcatcatcctgatgttcacttcgttgtctgactccctgtcgacgaagatagaatcgtctttttcgcgaagtcttacaaggcgcttacagacaatgccttaaggaaaatttcatatgaaagttaagaattaacaatcaacattttgattttaaatgaaaataacgattcttatctttttaagtattcgcttatttcctggcgatctcctacagagtctgtaagagatctctcacaaccagatggggtatttggattacagaagaggcttaagttgattaaggaattccgcaagattactggctaaatgcgtccgtttacgtgttcccagcgtctctttgcacacttcaccggagagattacacacgctgatgacctctaactcttcttccagcgtcgcgataaatagtgtgggcggcagttttagccttttctgagtcaccagatgaccaatcagattttcctgcacccgacggaagtcgtcttcactccaggtttgcagcaatgtcagtttgatatcgccaaactgcgcgtgcatatccccggcaaactgagtcgtataaaaggtatgaattgtgggttgtatcacaatatcaaaagcgcgttcaaccgcgtttacattttgttccccggtaaacggctggggttgccagtatacggcatcttcggtagtactaataatgcacggactaggaacaccgtacagttcctcacttaacggccagcttttatgctcttcatgccacgcatcgcagtagcgtgcagtaaaatctttcagggcttgtgcggtcaaatcgtccactaatttctctcttcacttaaaccagatacacttgtcgtttagtttatctggtttatgacggtgaaacatgtcttcttatgcaaaccatcaggcacttgcgggcctgactcttggaaaaagtaccgattaccgggatacctatgacgccagcctactgcaaggcgttccacgcagcctgaatcgcgacccgctgggtctgaaagcggataacctgccttttcacggtacggatatctggacgctgtatgaactttcctggctgaatgcgaaaggtttgccgcaggtcgctgtcggtcatgttgaacttgattacaccagcgtaaatctgattgagagcaagagttttaagctctatctcaacagttttaaccagacgcgttttaataactgggatgaggtgcgccagacgctggagcgcgacttaagcacttgcgctcagggtaagattagcgtggcgttatatcgtcttgatgaactggaaggccagccgataggtcattttaatggcacttgcattgatgaccaggatatcactatcgataactatgaattcactactgactatctggagaatgccacctgtggtgaaaaagtagtggaagagacgcttgtcagccacctgctgaaaagtaactgcctgatcacccatcaaccagattggggtagcctccaaattcagtatcgtggacgccaaattgacagagaaaaactgctgcgttacctggtcagtttccgtcatcacaacgagttccacgaacagtgcgtggaacgcatctttaatgacctgttacgcttctgccagccagaaaaattgagcgtttacgcacgttatacccgtcgtggcggtctggacattaacccgtggcgcagtaatagcgattttgtcccaagcaccacaagactggttcggcaataaatttttctcaattttgcgtgctggattcacgcagaaggttgtgaaaggtcatcaggcagggctattgtaatcaaagggaatgacgatattcgtcccataaggagtttttcttgattacacatattagcccgcttggctccatggatatgttgagccagctggaagtggatatgcttaaacgcaccgccagcagcgacctctatcaactgtttcgcaactgtagtcttgccgtactgaactccggtagtttgaccgataacagcaaagaattgctgtctcgttttgaaaatttcgatattaacgtcttgcgccgtgaacgcggcgtaaagctggaactgattaatcccccggaagaggcttttgtcgatgggcgaattattcgcgctttgcaggccaacttgttcgcggtcctgcgtgacattctcttcgtttacgggcaaatccataacaccgttcgttttcccaacctgaatctcgacaactccgtccacatcactaacctggtcttttccatcttgcgtaacgctcgcgcgctgcatgtgggtgaagcgccaaatatggtggtctgctggggcggtcacagtattaacgaaaacgagtatttgtatgcccgtcgcgtcggaaaccagctgggcctgcgtgagctgaatatctgcaccggctgtggtccgggagcgatggaagcgccgatgaaaggtgctgcggtcggacacgcgcagcagcgttacaaagacagtcgttttattggtatgacagagccgagcattatcgccgctgaaccgcctaacccgctggtcaacgaattgatcatcatgccagatatcgaaaaacgtctggaagcgtttgtccgtatcgctcacggtatcattatcttccctggcggtgtgggtacggcagaagagttgctctatttgctgggaattttaatgaacccggccaacaaagatcaggttttaccattgatcctcaccggcccgaaagagagcgccgactacttccgcgtactggacgagtttgtcgtgcatacgctgggtgaaaacgcgcgccgccattaccgcatcatcattgatgacgccgctgaagtcgctcgtcagatgaaaaaaagcatgccgctggtgaaagaaaatcgccgtgatacaggcgatgcctacagctttaactggagtatgcgcattgcgccagatttgcaaatgccgtttgagccgtctcacgagaatatggctaatctgaagctttacccggatcaacctgttgaagtgctggctgccgacctgcgccgtgcgttctccggtattgtggcgggtaacgtaaaagaagtcggtattcgcgccattgaagagtttggtccttacaaaatcaacggcgataaagagattatgcgtcgtatggacgacctgctacagggttttgttgcccagcatcgtatgaagttgccaggcagtgcctacatcccttgctacgaaatctgcacgtaatctccgctcccccggtgacgtttgttgccgggttttctcgtttttggtcacttactcatcaactcatttcatttgttatatgaatgtttcttaccaccctcacgcgacaaatatcatcacagttaatatgtcatacaatttatgttgcaacgcaaacgtttccctattttcataaaccgtattttatcgctatgaaaaagaaattatcgccatgattaactaaaagtattgattttttcagttcaacctacatatattgcgcgccccggaagaagtcagatgtcgtttaatgggcaaatattgcccttaaattctcttttacttttgatttacagagtaaagcgttgggataatctatcttccaagtagattattgtatttgagatcaagatcactgatagatacataacttgtgtgtatctttccgccctcaaattattacggcggtaaatgattaagccatcgccgatagacagatttcatttttacggtcaggcaccttcccgggctgaactggctaaaagctgaattatttgcattcctccaggagaaatagatggaaacgactcaaaccagcacgattgcgagcaaagactctcgtagtgcctggcgcaagacagacaccatgtggatgctgggcctttacggcacggcaatcggcgcgggcgtgctgttcctgccaatcaacgccggtgttggcggtatgatcccgctgatcatcatggctatccttgcgttcccgatgacgttttttgctcaccgcggcctgactcgcttcgtactgtctggtaaaaacccgggcgaagacatcaccgaggttgtagaagaacactttggtattggcgcaggtaaactgattaccctgctctacttcttcgctatctacccgatcctgctggtttatagcgtggcaatcaccaataccgttgaaagcttcatgtctcaccagctgggtatgacgccaccgccgcgtgcgattctgagcctgatcctgatcgtgggtatgatgaccatcgttcgcttcggtgagcagatgatcgttaaagcgatgagtattctggtattcccgtttgttggcgtactgatgctgctggctctgtacctgatcccgcagtggaacggcgctgcactggaaacgctgtctctggacactgcatctgcaaccggaaacggtctgtggatgaccctgtggctggcaattccggtaatggtgttcagcttcaaccactctccgatcatctcttctttcgccgttgcgaagcgtgaagagtacggcgatatggcagaacagaaatgcagcaagatcctggcattcgcacacatcatgatggtgctgaccgtaatgttcttcgtcttcagctgtgtactgagcctgactccggcagacctggctgcggctaaagagcagaacatcagcattctgtcttacctggctaaccactttaacgcaccggttatcgcgtggatggctccgattatcgcgattatcgctatcaccaaatccttcctcggtcactacctgggcgcacgtgaaggcttcaacggtatggtgattaaatctctgcgtggtaaaggtaagtctatcgaaatcaacaagctgaaccgtatcactgcgctgttcatgctggtaacgacctggattgttgccaccctgaacccgagcatcctgggtatgattgaaaccctgggcggtccaatcatcgcgatgatcctgttcctgatgccgatgtacgcaattcagaaagtaccggcaatgcgtaagtacagcggtcacatcagcaacgtattcgttgtcgtgatgggtctgattgcaatctccgcaatcttctactctctgttcagctaagtcctttcgcgccgctttcgggcggcgcttcctccgttttaacgcgatgtatttcctatgattagcgtattcgatattttcaaaatcggcattggcccttccagttctcataccgttggaccaatgaaagcgggtaaacaatttaccgacgatctgattgcccgtaacctgcttaaagacgtgacccgcgtggtggttgacgtgtacggcagcctctctctgaccggtaaaggccaccacactgatatcgccattattatgggcctggcgggtaacctgccggataccgtggatatcgattccatccccagttttattcaggatgtgaatactcatggtcgcctgatgctggcaaacggtcagcatgaagtggagttcccggttgatcagtgcatgaacttccacgccgacaacctttctctgcatgaaaacggtatgcgcattaccgcgctggcgggcgataaagtcgtttacagccagacttactactctattggcggtggctttatcgttgatgaagagcattttggccagcaggatagcgcaccggttgaagttccttatccgtacagtagtgcagccgatctgcaaaaacattgtcaggaaaccgggctgagtctctctggcctgatgatgaaaaacgagctggcgctgcacagcaaagaagagctggaacagcacctggcgaacgtctgggaagtcatgcgcggcggtattgagcgcggtatttccaccgaaggcgtgttgcctggcaaactgcgcgttccacgccgtgctgcggcactacgccggatgctggtcagccaggataaaaccaccactgacccgatggcggttgttgactggatcaacatgtttgcactggcagtgaacgaagagaacgctgctggcggtcgcgtggtgactgcgccgactaacggtgcgtgcgggattatcccggcagttctggcgtactacgacaagtttatccgcgaagtgaacgctaacagtctggctcgttacctgctggtagccagcgccattggttctctttataagatgaacgcgagcatttctggtgctgaagtgggttgccagggtgaagttggcgtggcgtgcagtatggcggcggctggtctggcagaactattaggcgcaagcccggcgcaggtgtgcatcgcggcggaaatcgccatggagcacaacctcggtctgacgtgtgacccggtcgccggacaggtacaggtgccatgcatcgagcgtaacgccattgcggcagtaaaagcggtgaacgccgcacgtatggcgctgcgccgtaccagcgagccgcgcgtctgcctcgataaagttatcgaaaccatgtacgaaacaggtaaagatatgaacgccaagtaccgcgaaacctctcgcggcggcctggcaatgaagatcgttgcctgcgattaatcgctctccaaaggcctcgttttgcgaggcctcttcccgatttctcatccagccgtagcctgttccggcatcgaatgttacccttatcgcctgatctttaagggggttatcgtggctgttcatttgcttattgtcgatgcactgaatcttattcgtcgcattcatgccgttcaggggagcccctgtgtcgaaacctgccagcatgcgctcgatcagctcattatgcacagccagccaacccacgcggtcgccgtttttgatgatgaaaaccgcagtagcggctggcgtcatcagcgtttaccagattacaaagcgggtcgaccgccaatgccggaagagttgcacgacgagatgcctgcattacgcgccgcctttgagcaacgcggcgtcccgtgctggagtaccagcggcaacgaagccgatgacttagccgccacgctggcggtcaaagtgacacaggccgggcatcaggcaacgattgttagcacagataaaggctactgtcagttacttagtccgacattacgtattcgtgattacttccagaaacgttggctggatgcgccatttatcgataaagaatttggcgttcaaccgcagcagttgcccgattactggggacttgcggggatcagcagtagtaaggtaccgggtgttgcgggaatcggaccaaaaagcgccacgcagctgctggtcgagtttcagagtctggaagggatatatgagaatctggatgcggttgccgaaaagtggcgcaaaaaattagaaacccataaagagatggcgtttctgtgccgcgatattgcccgcttacaaaccgatttgcatatcgacggcaatttacagcaattgcggttggtacggtaacggcgagccggatacgccgcaaacgtcgtatccggcattatcacatcagcgcatttaccaggcggtatggtaaagctctacaatatcctcaagcgttgcttcacgcgggttgccaccggtacaaacatcatccagtgccgcctgcgccagtgccggaatgtcttccttgcgtacaccaacatcacgcaaatgtggcggaataccgacatcacggttgagagcaaacaccgcttcaacagcggcattacgcgcctcttccaggctcataccttccactttcacgcccataacgcgcgcgatatcgcggtacttctcaccggtaaagtcagcgttataacgcatgacatgcggtaacaggatggcgttcgcaacaccgtgtggagtgttataaaacgcgcccagtggatgcgccataccatgcaccaaccctaacccaacattgctgaagcccatacccgcaacatactgcccgagcgccatttcttctccggcatccttatcaccagcaacgcttcctcgcagcgccccagcaatgatttcaatcgctttaatgtgcagtgcatcggttagcgcccacgcgccacgggtaatatacccctcaatagcatgagtgagcgcatcgacacccgtcgcagctttcagcgctggaggcataccatccatcatgtcagcgtcaataaacgccacctgcgggatatcatgcggatcaacgcaaacaaacttgcgccgtttctcttcgtcagtgatcacgtagttaatggtcacttctgccgcagtacctgctgtggtaggaattgccagaatcggtacactgggtttattggtcggggaaagcccttccaggctacgcacatcggcaaactccgggttgttgctgataatgccaatcgctttacaagtatcctgtggagaaccaccaccaatagcgatcaggtaatccgcgccgctattctggaatacaccgagcccttctttgacgacagtaattgttgggttgggcactacgccgtcgtaaatcgcccatgccagccctgcagcatccatcttatcggtcactttcgccaccacgccgcattgcaccagcgttttatcggtgacgatcagcgccttctgataaccacggcgtttcacctcatcggttaaagccccaacagcaccccgaccaaaccatgccgtttcgttcagaatcattctgttagccatcatccttctccttgttgctttacgaaattactcttcaattcgtaacccataggttttgaatttctccagcactacggcaatctcttcatcgctcagcactggcaccgggtccgtaatcgccagggtcgtcaggtaaagttgcgccagcacttcaacttcatgcgccagccataacgctttttccagattcacctcacaagcgataagcccatgatgttgtaacaaagttgccttacgatttttgagagccagcgcaacatgttcagaaagttcgcgtgttccaaaggtcgcataaggcgcgcaaggaatagaattaccgccagccgccgcaatcatgtagtgaatagcggggatgcttcggttaagaatggaaactgccgtgcaatgaacggcatgattgtgaacaaccgcgttggcatccggtctgctttgataggctgccatatggaaacgccattcgctactggggagctttccttcctcatgtttaccgttgccatcaataaagacaatatggctctccgtcagtttttcatatggaatgcctgtaggcgtaatcagcatcccatcctgataacgtacactgacgttccccgctgtcccctggttcagtcccaggcgggtcatttccaggcaagtgtcaataatctgacgagcaagtttatttcgttccattagctacctctctctgattcaaaacagggcaataatgttgttcctttcacactattgaattagccgtttaattacccaccatcttcttcctgattaacaagaaagaaattcacaagcttatattttgtgacctggttcaactaatcacagtaaataactgcaagttctctttttataaccccattaaaaatgaccgctcttaaaaatatttatcaaaacggtcatttttctattcctccaagcccggaatgaccgttttcggcacaaacaattaatacggtcatctgatttgtgttttttatgatttattttctgaaacgggcatgaaatttcgattattaaagtgatggtagtcacataaagtcaccttctagctaataagtgtgaccgccgtcatattacagagcgttttttatttgaaaatgaatccatgagttcatttcagacaggcaaatattcactgatatgaagcccgaactcgctggttttgcacttttgaaaacataaccgattacgtgcttaagcttctgaacctaagaggatgctatgggaaacacaagtatacaaacgcagagttaccgtgcggtagataaagatgcagggcaaagcagaagttacattattccattcgcgctgctgtgcagtctgttttttctttgggcggtagccaataaccttaacgacattttattacctcaattccagcaggcttttacgctgacaaatttccaggctggcctgatccaaagcgccttttactttggttatttcattatcccaatccctgctgggatattgatgaaaaaactcagttataaagcagggattattaccgggttatttttatatgccttgggtgctgcattattctggcccgccgcagaaataatgaactacaccttgtttttagttggcctatttattattgcagccggattaggttgtctggaaactgccgcaaacccttttgttacggtattagggccggaaagtagtggtcacttccgcttaaatcttgcgcaaacatttaacagctttggcgcaattatcgcggttgtctttgggcaaagtcttattttgtctaacgtgccacatcaaagccaagacattctcgataaaatgtctccagagcaattgagtgcgtataaacacagcctggtattaagcgtacagacaccttatatgatcatcgtggctatcgtgttactggtcgccctgctgatcatgctgacgaaattcccggcattgcagagtgataatcacagtgacgccaaacaaggaagcttctccgcaagcctttctcgcctggcgcgtattcgccactggcgctgggcggtattagcgcaattctgctatgtcggcgcacaaacggcctgctggagctatttgattcgctacgctgtagaagaaattccaggtatgactgcaggctttgccgctaactatttaaccggaaccatggtgtgcttctttattggtcgtttcaccggtacctggctcatcagtcgcttcgcaccacacaaagtcctggccgcctacgcattaatcgctatggcactgtgcctgatcagtgccttcgctggcggtcatgtgggcttaatagccctgactttatgcagcgcctttatgagcattcagtacccaacaatcttcagcctgggcattaagaatctcggccaggacaccaaatatggtagctccttcatcgttatgaccattattggcggcggtattgtcactccggtcatgggttttgtcagtgacgcggcgggcaacatccccactgctgaactgatccccgcactctgcttcgcggtcatctttatctttgcccgtttccgttctcaaacggcaactaactgaacatattttccgaataaagtgaggaatctgtaatgaaaaaaatcagcttaccgaaaattggtatccgcccggttattgacggtcgtcgcatgggtgttcgtgagagccttgaagaacaaacaatgaatatggcgaaagctacggccgcactgctgaccgagaaactgcgccatgcctgcggagctgccgtcgagtgtgtcatttccgatacctgtatcgcgggtatggctgaagccgctgcttgcgaagaaaaattcagcagtcagaatgtaggcctcaccattacggtaacgccttgctggtgctatggcagtgaaaccatcgacatggatccaacccgcccgaaggccatttggggctttaacggcactgaacgccccggcgctgtttacctggcagcggctctggcagctcacagccagaaaggcatcccagcattctccatttacggtcatgacgttcaggatgccgatgacacaagcattcctgccgatgttgaagaaaaactgctgcgctttgcccgcgccggtttggccgtcgccagcatgaaaggtaaaagctatctgagcctgggcggcgttagcatgggtatcgccggttccattgttgatcacaacttctttgaatcctggctgggaatgaaagtccaggcggtggatatgaccgaactgcgtcgccgtatcgatcagaagatttacgacgaagccgaattggaaatggcactggcctgggctgataaaaacttccgctatggcgaagatgaaaataacaaacagtatcaacgtaatgccgagcaaagccgcgcagttctgcgcgaaagtttactgatggcgatgtgtatccgcgacatgatgcaaggcaacagcaaactggccgatattggtcgcgtggaagaaagtcttggctacaacgccatcgctgcgggcttccaggggcaacgtcactggaccgatcaatatcccaatggtgacaccgccgaagcgatcctcaacagtagttttgactggaatggcgtgcgcgaaccctttgtcgtggcgaccgaaaacgacagtcttaacggcgtggcaatgctaatgggtcaccagctcaccggcaccgctcaggtatttgccgatgtgcgtacctactggagtccagaagcaattgagcgtgtaacggggcataaactggatggactggcagaacacggcatcatccatttgatcaactccggttctgctgcgctggacggttcctgtaaacaacgcgacagcgaaggtaacccgacgatgaagccacactgggaaatctctcagcaagaggctgacgcttgcctcgccgctaccgaatggtgcccggcgatccacgaatacttccgtggcggcggttactcttcccgcttccttaccgaaggcggcgtcccgttcaccatgactcgtgtcaacatcatcaaaggcctgggaccggtactgcaaatcgcggaaggctggagcgtggaattgccgaaggatgtgcatgacatcctcaacaaacgcaccaacagtacctggccaaccacctggtttgcaccgcgcctcaccggtaaagggccgtttacggatgtgtacagcgtaatggcgaactggggcgctaaccatggggttctgaccatcggccacgttggcgcagactttatcactctcgcctccatgctgcgtatcccggtatgtatgcacaacgttgaagagaccaaagtgtatcgtccttctgcctgggctgcgcacggcatggatattgaaggccaggattaccgcgcttgccagaactacggtccgttgtacaagcgttaatacattactccctgatgtgatgcccggtcgctccggctaccgggcctgaacaagcaagagtggttagccggataagcaatgttatccggctatattgcaggagcgattatgaaacaagaagttatcctggtactcgactgtggcgcgaccaatgtcagggccatcgcggttaatcggcagggcaaaattgttgcccgcgccagtacgcctaatgccagcgatatcgcgatggaaaacaacacctggcaccagtggtctttagacgccattttgcaacgctttgctgattgctgtcggcaaatcaatagtgaactgactgaatgccacatccgcggtatcgccgtcaccacctttggtgtggatggcgctctggtagataagcaaggcaatctgctctatccgattattagctggaaatgtccgcgaacagcagcggttatggacaatattgaacggttaatctccgcacagcggttgcaggctatttctggcgtcggagcctttagtttcaatacgttatataagttggtgtggttgaaagaaaatcatccacaactgctggaacgcgcgcacgcctggctctttattagcagcctgattaaccaccgtttaaccggcgaattcactactgatatcacgatggccggaaccagccagatgctggatatccagcaacgcgatttcagtccgcaaattttacaagccaccggtattccacgccgactcttccctcgtctggtggaagcgggtgaacagattggtacgctacagaacagcgccgcagcaatgctcggcttacccgttggcataccggtgatttccgcaggtcacgatacccagttcgccctttttggcgctggtgctgaacaaaatgaacccgtgctctcttccggtacatgggaaattttaatggttcgcagcgcccaggttgatactagcctgttaagtcagtacgccggttccacctgcgaactggatagccaggcagggttgtataacccaggtatgcaatggctggcatccggcgtgctggaatgggtgagaaaactgttctggacggctgaaacaccctggcaaatgttgattgaagaagctcgtctgatcgcgcctggcgcggatggcgtaaaaatgcagtgtgatttattgagctgtcagaacgctggctggcaaggagtgacgcttaataccacgcgggggcatttctatcgcgcggcgctggaagggttaactgcgcaattacagcgcaatctacagatgctggaaaaaatcgggcactttaaggcctctgaattattgttagtcggtggaggaagtcgcaacacattgtggaatcagattaaagccaatatgcttgatattccggtaaaagttctcgacgacgccgaaacgaccgtcgcaggagctgcgctgttcggttggtatggcgtaggggaatttaacagcccggaagaagcccgcgcacagattcattatcagtaccgttatttctacccgcaaactgaacctgaatttatagaggaagtgtgaaatgctgaaaacaattagcccgttaatttctcccgaactattgaaagtgctggcagagatgggacatggagatgaaattattttttccgatgctcactttcccgcccatagcatgggaccgcaggtgatccgcgctgatggcctgttggtgagcgacttgctccaggcgattatcccgttatttgaactggacagttatgcaccgccgctggtgatgatggcggcggtagaaggtgacactctcgatcctgaagtagaacgacgttaccgtaatgcgcttagtctacaagccccgtgtcctgacatcatccgcatcaatcgttttgcgttttatgaacgggcgcaaaaagcctttgcgatcgttatcacaggcgaacgagcgaagtacgggaatattcttttaaaaaaaggggtaacaccgtaatctcataccggtacgcccgcatgacgcgggcggttatcgaatgatggggtgaaaaatatgaaagcggcacgccagcaagcgatagtcgacctgctgctgaaccataccagcctgaccacggaagctctctctgaacagctaaaggtcagtaaagaaaccattcgtcgcgatctcaatgaattacagacgcagggtaaaattctgcgcaatcatggacgcgctaaatatatccaccgtcaaaatcaagacagtggcgatccctttcacatcaggctgaaaagccattatgcgcataaagcagatatcgcgcgcgaggcgctcgcgtggattgaagaagggatggtgatagccttagacgccagtagtacttgctggtatctggcacgccagttgcctgacatcaacattcaggtcttcaccaatagccatccgatttgccatgaactcggtaaacgcgaacgcattcaactgatcagttccggcggcacacttgagcgcaaatatggctgttacgtcaatcccagcctgatttcccaacttaaaagcctggaaatcgatctgtttattttttcttgtgaagggatcgatagcagcggcgcactgtgggactccaatgcgatcaacgctgattacaaaagcatgctattaaaacgtgccgcgcaaagcttgttattgattgataaaagtaaatttaatcgtagtggggaagcccgcatcgggcatctggatgaggtaacgcacattatttctgatgagcgccaggttgcaacttctttggtaacagcctgacggaaagggtagcaggccggagacgacgccccggccttgcctgttatcgctcgtcgcgacgaccacccaccgcagcccagatgcggcggacgtgcaccgtcacttcttcgcgatcgtgatacaactgccgcgcctgaatctgagcatttatgccatgttcatcaagctgtgcctgaatatacgccagattgtgactcacttcttcgtagcgttttttcatcggcagtttgaggttgaaaatggtttcacggcaccagccattaaccagccactgtgccatcaatgccgcaactttcgccggtttttcaaccatatcgcataccatccaggagatattgctgcgcgtcggacggaatttgaaaccgtcttcccgcagccacgtcacctgtccggtatccatcagactttgcgccatcgggccgttgtcgacggaataaacccacatgttgcgcttcaccagttggtaggtccagccgccagggcaagcgcctaaatccaccgcccacatcccgttcgccaggcgttcatcccactcatccgcaggaataaacacatgaaatgcctcttccagtttgagcgtggaacgactcggcgcatctgccggaaatttcaggcgcggaatgcccatatagaacgggctattattgttgctgtaactgtaaccggtatagcagcagcctggtgcaataaagaatacatgcacaaccggacgcttcggcgtttcatagttcgccagcaccccggcatcgcgcaaggcagcgcgtagcggaacagtaaatttacggcagaatttcagtaactctttgctttcgttggtatcggcaacttcaacacgcagttcaccgcccttctctactacgccctgtaacatgccgacaatgggggtaatacgatcttctggcggcaaatgctgcaggagttcccccaccacaaaccactggcgggcaaaaattaaactactgaacggcagctcacggattaacttatcgccatcatcaggttgataacattcataaatgacataacccgcattctctttcacgcgggcaaaaccgaaaatttcccgctggccggctttatcggtaatttctgcggcgcactctttttcaaagcccggacggcacagcaatacaaccttattcatgacttacgcccttgcgctttaaacggatagcaccaactaacattaacgcccagcccgcgaggaagctcacgccgccaaccggagtgacaaacgcccacaaacgcagatgggacagcgccaggcaataaaggctgccgctgaacaacaccgtgcctaacgcgaggaaaacgctactccagtaaaaccagatactgatgcgacgctgcattgccaccgccagacctaagatcgccagcgtatgaaacgcctggtattcgaggccggtctggatccagcccatctcaacggcccccatggttttacttaacacatgcgcgccaaaagcgcccagagccacaaaaatgaagccgctaatggcggcgaaaatcagcataaaacggctggtcatggtcgtaccctacgtaaattattgttcataacgaaagcggaatttttcttgttcagcagcggctttcgccaggatccattggcgaaaggcggctattttacccagttctgcctgactgtcatgacaaaccagataaaaagcatttttactgaccagaacatcattaaacgggcaaacaagacgtccggcctcgatttcagattgcgccatcacgttatttgccagcgccactccctgcccgtggatagccgcttgcagcaccatggcgctatggctaaaaattggcccttgctgaacgttgatatgatttaaccccaactgtcgggtatatgtctgccagtcacggcggctagcatcatgtaataacgtatgtttagccagatcttccggtgtcttcaagggtttttcgccagtcagcagtagcgggctacacaccggcaataaatattcggcgtacagtttttccacccgtagccccggccagttgccccgaccataaaatatcgccacatcaacatcatccgccagcttatcttcctgacgatcaaccgcctggattcgaacgtcaattcccggataagcactattaaagctggaaagtcgcggaaccaaccaatgaatggcgaaactggggagtaaactgaccgtcaacgcccccttggcgctacgggcctggagtttacgcgtcgcttcggttaattggctaaatatctctttgatatcgaggaaatagctttgcccttcctcggtcagcaggagactacgattacggcggcggaacagttttagccccaaaaaatcctcaagagacttgatttgatgacttactgcggcttgggtcacaaaaagctcttctgctgcgcgagtgaaacttaaatggcgtgctgcggcatcaaaaactcgtaaggcatttagcggtggtaatcgtttagacatggctattaaactttgatgttaaatgaatttaacaattagatcacactatgtaacctattagtttttttaatctgagccattataaattgtccgttgagcttctaccagcaaatacctatagtggcggcacttcctgagccggaacgaaaagttttatcggaatgcgtgttctggtgaacttttggcttacggttgtgatgttgtgttgttgtgtttgcaattggtctgcgattcagaccatggtagcaaagctaccttttttcacttcctgtacatttaccctgtctgtccatagtgattaatgtagcaccgcctaattgcggtgcttttttttaccttgcgatcgcgaattactgatccagttcgaccatctctttcacgtcagtacggttgatctgctgtttgttgccattagcgtctttatagctaatcataccggtatcgttatcagtctgtggtttgccgtcagagacgatggtacgtccgtcattggtgtgcatcacatagttgctaccggaacaggcgctcagggcaaaagtcagcatacaggcagaaataattgcggcagtctttttcatcatcttctccttaaagcgattaataaatcttaatagtattgattaacaggctaaaattaacgcctaacactattcagcatatgttacttacgcggcttcgccaggatatccagataattctgatggttagcactctccttgtatcaaagtgaattttgcgtcacgatcggtgcatcaagccgaggagtaccatgaacgtttttaatcccgcgcagtttcgcgcccagtttcccgcactacaggatgcgggcgtctatctcgacagcgccgcgaccgcgcttaaacctgaagccgtggttgaagccacccaacagttttacagtctgagcgccggaaacgtccatcgcagccagtttgccgaagcccaacgcctgaccgcgcgttatgaagctgcacgagagaaagtggcgcaattactgaatgcaccggatgataaaactatcgtctggacgcgcggcaccactgaatccatcaacatggtggcacaatgctatgcgcgtccgcgtctgcaaccgggcgatgagattattgtcagcgtggcagaacaccacgccaacctcgtcccctggctgatggtcgcccaacaaactggagccaaagtggtgaaattgccgcttaatgcgcagcgactgccggatgtcgatttgttgccagaactgattactccccgtagtcggattctggcgttgggtcagatgagcaacgttactggcggttgcccggatctggcgcgagcgattacctttgctcatagtgccgggatggtggtgatggttgatggtgctcagggggcagtgcatttccccgcggatgttcagcaactggatattgatttctatgcttttagtggtcacaaactgtatggcccgacaggtatcggcgtgctgtatggtaaaagtgaactgctggaggcgatgagcccctggctgggcggcggcaaaatggttcacgaagtgagttttgacggcttcacgactcaatctgcgccgtggaaactggaagctggaacgccaaatgtcgctggtgtcataggattaagcgcggcgctggaatggctggcagattacgatatcaaccaggccgaaagctggagccgtagcttagcaacgctggcggaagatgcgctggcgaaacgtcccggctttcgtagtttccgctgccaggattccagcctgctggcctttgattttgctggcgttcatcatagcgatatggtgacgctgctggcggagtacggtattgccctgcgggccgggcagcattgcgctcagccgctactggcagaattaggcgtaaccggcacactgcgcgcctcttttgcgccatataatacaaagagtgatgtggatgcgctggtgaatgccgttgaccgcgcgctggaattattggtggattaatgacaaacccgcaattcgccggacatccgttcggcacaaccgtaaccgcagaaacgttacgcaataccttcgcaccgttgacgcaatgggaagataaatatcgccagttgatcatgctggggaaacagcttccggcattgccagacgagttaaaagcgcaggctaaagagattgccggatgcgaaaaccgcgtctggctgggatatacagtggctgaaaacggcaaaatgcatttctttggcgacagcgaagggcgcattgtgcgcggcctgctggcggtgttgttgactgccgttgaggggaaaaccgccgccgagttgcaggcacagagtccactggcattgtttgatgagctgggattacgtgcgcagcttagcgccagtcgcagccaggggttaaatgcgttaagcgaggcgattatcgctgcgacgaagcaggtttaagcacagaaccgggtcggataagacgttcgcgtctcatccgacctgattgtttaaccctgacgcgccgctttcgccatcatcttcttcagcgcatgagaaaccgcaacaaacccaaaggtggcggtcaccatcgttgccgcgccaaatccagatgcacaatccatccgcttcggcccttctgccgtggctttcatcgcacacaccgtaccgtcactctgcgggtacaccagcgcttcagtagaaaacacgcaatccacgccgagcttacctttactgtttttcactacgccaaaatcgcttttcaggcgctcgcgcaacttcgccgccagcgggtcctgaatcgttttcgccagatcggtaacctgaatctgcgtcggatcaatctgcccacccgcgccaccggttgtgaccagtgggattttattgcgccgacaataagcaatcagcgccgctttgggccgtacactatcaatggcatcaatcacgtagctataacccacgctcatatactgcgctacgttatccggcgtcacgaaatcatccaccaccgttacacggcactccgggttaatctggcgaatacgctccgccataacttccgcttttgccagcccaacgttatcgcgcagggcatgaatttgccgattggtattggtgacgcacacatcatccatatcgataagcgtgattgcgccaatccccgtgcgcgccagcgcttccgccgcccaggaaccgacaccaccgataccaaccacacaaatatgcgcgtcagcaaacagttgcaacgctttttcaccatacagacgcgctgtgccaccaaaacgctgacgccatgcatcactaattaccacagacatagcacctcagaattaaaaagggcgaggttatccctcaccctaaacgcataaatgcctgatgcgctacgcttatcaggcctacataactcctgcaatattttggatttgcatgatttgtaggccggataaggcgttcacgccgcatccggcatgaacaacgcgcacttagtcaataatcaggatgtgaggttacccctcaccctgtcatatccgtaaaaacggcatacagaatatcacatcagccgctaaagacgttacctgcgcccggggcggttttcagcacccagacacgtccatagtggttgtaccaacctgcgcggtgtccggcttccggcccgatcccttgatagatatcgaagtgttggcctttgattgcaccaccgacatccagcgccaccatcagacgcagttcgtactgaccattaaatttgccgttattatccagcaacggcacttctgccagcaaggtagtacctggcggaataatggaacgatcagaggcaacactcgcgcgaccaaccagcggcaccgcacttgcccctttcaccggagcaaaagattgcggtttaaagaagacgaaagacgggttctgttccagcagctcgcgaacctcggcttcactgtgtgtttcgccccagtgacgaatcgcctgcatgctcatatcttcttttttcacttcgccacggtcgatcagcaccttaccaatgctgcgataggcatgaccgtttttccctgcatagctgaaaaagttaagcggactgccatcaccaaagtcgatatacccactaccctgcacatccataatgaagttatccatcagggagttactgtaagcgagaatatatttatcactcaatgcccccgcgtagatctccgcacgagacggcagacgaccacgttttggcggcatacggtaaataggatactggaactcgccctggcgggtatggcgcgcctgaattaccggcgtgtaataaccggtaaactgcacgttaccatagttgtcggcaccttccatctgccaggcatcaatgccgaactggcgcatattgcgggtatcaccgcctgcgcgcagccactcttgcaccgcgttataaacattactctggttgccatacagacgcggactgctattacggatatggttaatttgctcggcaaaatcaccggcgttaatcggcgcgccaacggcatctggctggttcaccagagagaaaggctgggtaaatttcccgtctttatattgctgtccgcgatcggttggtttggaagagcaggcggcaagcattgccacaaccgtgcccataagaaggtactttacccaacgtcctttcattgttctcttcttcaggttaaaaaataaggcgcaacgaagataacaaaccgccgcgtttaatgaaatgagcagcctctccctgacgcaaattttgcacaaaaaataggctttagtgatttgtttttgttcaaaatcatgccaaatccgtgatcggggtaaaaaaaaggttgcatgaaaacgcgagcggagtatagtgcgcatccacggacgcggggtggagcagcctggtagctcgtcgggctcataacccgaaggtcgtcggttcaaatccggcccccgcaaccaattaaaatttgatgaagtaaagcagtacggtgacgcggggtggagcagcctggtagctcgtcgggctcataacccgaaggtcgtcggttcaaatccggcccccgcaaccaatcaaatttgatgaagtaaaagcagtacggtgacgcggggtggagcagcctggtagctcgtcgggctcataacccgaaggtcgtcggttcaaatccggcccccgcaaccaattattgaacaccctaacgggtgtttttttgtttctggtctcccataaaaaagcgccattcagcgcctttttatcatccccttctcgccagcgtcgccccatcggcaaaatacgctttaatccccgcaagaatagactccgcaacttcctgctggaaagtcgccgttttcagtttacgctcttcctcaacgttactgataaacgccgtttcgaccagaatggagggaatatctggtgcctttagtacggcaaacccggcctgttcaacttgatttttatgcagcttgttgattttaccgagcttattcagtaccgctttaccaaacttcaggctgtcggcaatggtcaggctctgtaccatatcgaacatggtgtggtcgacatagcggtcaccgcttttgctcacgccaccaatcaagtcgctggcgttctgggtttgtgccagatattttgccgcagtactggttgcacctttggtactgagcgcaaacacagaggaaccgctcggctgacgactggtaaaggcgtcggcatggatagagacaaacaggtcagcacgctgtttctgggcttttgctacgcgcacttgcaatggaatgaagatgtcttcattgcgcgtcatgtacaccttcatattgccctctttctcgatcagagagcgcaaacggcgagctatttgcaataccacatctttttcgcgcgttttgtatttccccaccgcaccggagtcttcgccaccgtggccagggtcaagcataatgacaatcggacgatcgcgccctgctttacccggttgtggaccactttgcgctggcggcacctgcttttcgaggtcgcctttgttgtaatcctccagcagcgccagcagcgggtcctgcatatcctgtgcattggccggatagaggtccatcaccagacgctctttaaacccggcgaccggcgcaagggcaaacagctgcggttttacgttttgctttaattcaaaaaccatccgtacggtttgcgggtcaaattgcccgacgcgcgcgctcttgatgaacgggtcgtctgcacgaatttgtgccgccatccccttgagtacgctgttcaggtttacatcttcgatatccaccaccacgcgttcagggttactcaacgcgaactgcttatatttcagctgacgattactttccaccgtcacgcgggtgtagctggacgcaggccagacgcgcaccgccacgacctggctgaccgcagccagactgacctgacttacgctcaatagccacatggcacccgcgccttgcagtaaacgacgacggctgattgcagtgttggatccactcatgcctctcccgagcaaaagaaatctaagctgtgtaacaagtaaacgactaatttgaccggaaactttagcgaaagacgcataatctgtcatctaataaacggtaaacattctttttatattcacggcattactgataaaaaagtcgctctcgcataaaatttacacttgcaccctgcgaaaaaacagaataaaaatacactaatttcgaataatcatgcaaagaggtgtgccgtggtaaaggaacgtaaaaccgagttggtcgagggattccgccatagcgttccctatatcaatacccaccggggaaaaacgtttgtcatcatgctcggcggtgaagccattgagcatgagaatttctccagtatcgttaatgatatcgggttgttgcacagcctcggcatccgtctggtggtggtctatggcgcacgtccgcagatcgacgcaaatctggctgcgcatcaccacgaaccgctgtatcacaagaatatacgtgtgaccgacgccaaaacactggaactggtgaagcaggctgcgggaacattgcaactggatattactgctcgcctgagcatgagtctcaataacacgccgctgcagggcgcgcatatcaacgtcgtcagtggcaattttattattgcccagccgctgggcgtcgatgacggcgtggattactgccatagcgggcgtatccggcggattgatgaagacgcgatccatcgtcaactggacagcggtgcaatagtgctaatggggccggtcgctgttagtgtcactggcgagagctttaacctgaccagcgaagagattgccactcaactggccatcaaactgaaagctgaaaagatgattggtttttgctcttcccagggcgtcactaatgacgacggtgatattgtctccgaacttttccctaacgaagcgcaagcgcgggtagaagcccaggaagagaaaggcgattacaactccggtacggtgcgctttttgcgtggcgcagtgaaagcctgccgcagcggcgtgcgtcgctgtcatttaatcagttatcaggaagatggcgcgctgttgcaagagttgttcagtcgcgacggtatcggtacgcagattgtgatggaaagcgccgagcagattcgtcgcgcaacaatcaacgatattggcggtattctggagttgattcgcccactggagcagcaaggtattctggtacgccgttctcgcgagcagctggagatggaaatcgacaaattcaccattattcagcgcgataacacgactattgcctgcgccgcgctctatccgttcccggaagagaagattggggaaatggcctgtgtggcagttcacccggattaccgcagtagtagtaggggtgaagttctgctggaacgcattgccgctcaggcgaagcagagcggcttaagcaaattgtttgtgctgaccacgcgcagtattcactggttccaggaacgtggatttaccccagtggatattgatttactgcccgagagcaaaaagcagttgtacaactaccagcgtaaatccaaagtgttgatggcggatttagggtaagcgatgaaaatcgtcggatgcgacatgcgtaacactcgtacgtcgcatccggcaattacgtttattcccgactactaaacaacgccgccagaccactgcgccgctcagtacgagtggcgattgccgcacttaatatgcgctcatcggcatacaggctcagacggcgacgcgcgcgggtcaccgcggtataaaccagctctcgcgttactaccggcgtgcgttggctcggcaaaatcaacgccgcatggtcgaactcgcttccctggcttttatgtaccgtcatcgcccacgtagtttcgtgctctggcaagcgactcggttgcacagacttaatattgccgtccggcatcgcaaaccagacgcgcgtcccctgcccgcgatccagcgcaataccgatatcgccattaaacaacccaagcgcgctgtcattacgggcaatcatcaccggtcgaccttcgtaccaacgagagtgcggatgacgatgaattttgcgcttctgttgcataaactgctcaattcgctcattcagtccagccacgccaaacggcccttcccgcagggcgcacaaaagctggtactcattgaacgcctgaatgattaaatccggctcggcacgcgcttgcagcagatccagataacgtccgtaacccgcaagagcttcctcaagcatcgcaatataatcttcgccgctctgtaaaagccgtttttcgatatcagtaaaatcctgctgaaaaacggttttcactgccgttttatcaccacggttgatcgccgcagctaactgaccaatgccagaatcgctgccgaaacgatagcttttttgcagcaggcagagactgtcgcgcaaagatgccgcttctgtgccggttcctgccggaacgtgagtccccgtcaggcggcttagctgcctggcacgctcggcggtaaagcccgcgttggcataagcgcagatatcgcccagcacagccccagcctcaacgctggccagttgatcacgatcgccgagaaagatcactcgcgcatgatcgggcaaggcgtcgatcagtctgctcatcataggcagatcgatcatactcgcttcatctaccaccagcacatcaagatgcagcgggttaccggcatgatgacgtaaacgctggctacccggctgcgcgcccagcaatcggtgcaaagtgctggtatcttccggaatgcgtttcttttgttcatcggtcagcggtaactgtcgcaaagccttgccgagagattcggttaagcgcgcggcagctttacccgttggtgcagccagacggatacggcagcgttcgccgtcggccatttgaattaacgctgccagcaacttcgctacggtggtcgttttaccggtgccagggccgccggaaatcacgctgatccgccgcgtcagcgccactgccgccgcaactttttgccagttaatttcatcgcttactggaaaaagtttgtccagggtttgcgccagtagagcttcatcaacctcaatggcatgattcacttcgttgaaaaagcgtgccactgtgcgctcgttacaccacatgcgattcaaataaagacgatcgccacagaggatcatcggcgtgggttcatctcccctgctgaccgcttgagaagccagcaagcattcttcccaattttgtagctcaccgatttcactgacacaggtcgccaacagcggatggctcgcctcgttattttccagtcgactaagcggcaaacaaacgtgtccctctccggcatcatgacttaacagtgccgccgcgagggtgacggcaggatgttcatctcccgccacggtcagggcaaattgcacatccagcgggcgtagctgtttgtgctccacagcttccagtaattgcttttgcaatttcattacgcctcctccagggtcataccggcaaacatctcatccatcagggcaatcaacccggcgttgggtcgggttgtgtaaatcccctgttgcggatgttctttatcaacgccacgcaggaacagataaataacgccgccaaagtggtgctcatagtcgtaatcagcaatgcgatggcgcagataacgatgcagcgccagggtataaagctgatattgcagatcatagcggtgtgcctgcattgccgctgccatagcctgttgggtgtaagcgctactgtcttcacccaaccagttggatttatagtcgagcaggtaataacgcccttcgtggcggaacaccaggtcgataaagccttttaacatgccacgtacctgcatgaactccagcggcgggcagcctgcggatagcgggtcaaactggcggattaacgtatcaagctgactggcgataagcggttcactaatcggcagataaaactccatctccacctgtttattgcgggcggaaagttgactcaggcttacgccggtttcattgagaggtgcctggaggacagccgtgatccactcggtcaataccggttcccactggctttcaaagccgccgagttccagtttttcccgcacccagttcgggtcaaccggctgggtaaaatccaggtcttcaaacaaactgtgcaagaacgtccccggactcgcaccgcgcggaaactgatgtggtgttaacgtcggttcttcaacgacgctggcaacgcctgcagcatcgacatccagccgaggcatcaaatcctgggcgataccgtgaccacgctgttgcaaaccagagtagctggtgacgcgccagttatcgccgggcaatcgttgtaacgtcttcgcattcagctctgctgtagaaacatcattaacctgccagggttggttatcaccagtttgtgccgtttgccaggcaatatcatcatcgcataacgcttcaatacaggtgcgaagccctgccgcatcttgcggttcccctttttgcagcaaacgcccgagcgcactttggtggacgtcggtgtcaccttttttatcgccacgacggcgcaccagcggtgcaacgccgagactgcaatgccaaacgctacgtgtcagcgccacgtaaagcaaacgcagatcttccgccagacgttcggcctccgcgaggtcgacgctttctggcgcagcattaagatccagaactgcctcaaagctgtggcgatcgtgataaaacgcctgctcctggacgcggaaattggtgataaacggcagccagaccaatggatattccagccctttgcttttgtggatcgtgacaatctgcaccagatgtttatcactttcgagacgcatttgttggctggaggcattactgtctggctcgaggatatgttggcttaaccagcgtaccagcgcatgttcactttccagctgcgttccggcttcttgtagcagttcgctgatatgcaagatatcggtaagacgccgctcaccgcctgccgttgccagcaagttttcagcaatgttacgcgcgctcatcagcgcccgcagcatcggcataacgccacgtttgcgccagatttgccgataaccatcgaactcttcgactaccacatcccacgcatgttcgtcattgttcagcgtttcgatatccagcgcgttcagccccatcatactcgttgccagcgcactacgcagggtgttctcacgttcgggcgtcatcaccgcctgcaacaaccaaagcatttcctgcgcttccagagtttcaaaaacactgtcgcggttgctaaggtaaacggaagggatttccagcaacgttaaggcatcgcgcacctgggcggcctcctggcggctgcgcaccagcacactgatgtcgctagcacgcaccggacgcgcgtcgtcgccgttcatcagcaacgcttcgccccgctgtccggcttgtagccagtcgcggatttgcgcagcacatacctgcgccatggtactttgataatcgccaacgccgcagctttcgccttccatcagccacattttcatcgcaggctgtgtttcacctttaaatacaaaacgtaacgcctgatttttcccggcacttttcactggaataaacggtatttcgcgaaacatgaacgcgtcatcagtctggctgaaaagcttattcacgctgttcaccattcctggtgcggaacgccagttggtgtctaaagtgtagtgggcgtgaacttcgctacgcgccttcatataagtgaagatatccgcaccccggaatgcatatatggcctgcttcgggtcgccaattagcaacaatgcggtttccggctgatggtgccagatacggcgaaaaattcggtactgctgggggtcggtatcctgaaattcatcgatcattgccaccgggaatcgcgtacggatcgccgctgccaacacctcaccgctttcgctacgcagcgcggaatcgagccgacttaacatgtcatcaaaacccaattcgccacggcggcgtttttcacgcgctactgtttcgcggatctcagccaatgcgcgggtgatcaccagatcgcggatgctcaatggttctgcaagcagttgatcgatcgcctcaaacagtggatgtcgcggggtttcccccccggccttcgtgcgatcttctaagaaacgctgggagaatttttccaggctctccggcaactgataactgtttgtctcttcttctgcccaggcgctgatcttgtcgatccatttagcctgattgctacggttaaacttgcgtcgatcaataccagaagattcgatcagcgcatccagttcacccactgcgtcgcgccactgctgttttaccgtatcaatacgcgccacaatttgcgcgtgacgggaagccagcgtttcatcatcgggcggcggtgctttgataaccggcgcttcgccttgcagataacgattaatatcgcgcagcaacgcctgcggccctttccaggtttcaaagacgacctgggctatttcacgcggcagcgggtagcagtggcgacgccagaaatcggcgcaggcctggtagcgtagcagagactcatcttcaatcagctgctgctcaaacagcatgccggattcaaaggcattcaggttgagcatgcgctggcaaaagccgtgaatagtaaagactgccgcttcatccatctgccgttcggctaacaacaaccactgcgcggcttgcgctttatcgtcgatctcttccagcaggcgttcgtacagtggattgtcggtggtttcacgcagacaggcgatgcgcaactcgtggatattgctacggatacgaccgcgcaattctgccgtggcagcctcggtaaaggtgaccaccagcagttcttcaacggtcagcgggcggggaaaggcggcggaaccgcctagtccaagtaacaggcgcaaatagagcgccgcaatcgtaaaggttttgcctgtgccggcagaggcttcaatcaggcgctcaccctgtaagggcaagcgcaaaggatctagtgtctcggcgacatcactcattcttttcactcatcaggggcattgtttgctgcaacgcgctgacgttctcccacactttccagccttcagggtgtacatattcggctttcccgttctggctgccggaaatctggctcagaatagccatgccttgcggctcgaccaccgcctgatggaagaaatcagcaagtttttgcggcgtcagcagttttatctgggccacgattttatcacggctatcgaagcgcatattgccgcgatcgaaatctttacttaacttgcttgcttcttcgccgagcgtttgcggtgcctgcagcatctgggtaattaccgcctgctggatttgcgcaaactcatctggcttcatcgctcgcaattttgcctctgcggttgggaaaaacgccttgtaacgctcccacaagaaactaggctgtttatcattgctttgcaaaaggaagcccatgccccactgacgccccacgctcattggaaacgcaaacacggcatagcccaattgttcttcggtacgcaactgattgtagaaccacggctgtacgatctgccccaacagagagctataggcactgctggtgtattcatcgtagccagtcggtacaaataccgctgccagtgcggagtcggtgctgttaccggctttttcaaagatgacggattgttttttatcgaccactacatctttgtttcgacaccactcactaccatcagcgcccaactgtttttgcacatcgcgtgccagcgttgttgcctgggcctcggtcatgttgccgataaccataaactctggtcgagccccactttttaaggcgtcgcgataggccagcacctctttcaacgtaatggagggcaaaattttacgccgttcatctcggctgaagtacggcacttggctgagcatctgcgcgggcataatcgcctgctcaaacgctttacccttttctgcggaatccatcatctggttataccaggacttcgcctgctcaagctgatcttccgtagcggtatagctaaagtacccctcgagcaatgcctggaacagctgcggcagacgctgggtgtaaccattagcattaaccataaggccgttgttagcgttggtggaaaaacttatgccaccaacgctcgcctggttgcttaactgatcaagcgccagccctgcgagataatcattgagcgcaaacatcacctgattgcgggcgctgtccatggctttcggattacgcaaaatcaggctgacatcagctttgggctcgctggcaaaataacggcttggcgcatacaccacgcgcagattgctctcatcaacaatcagctctggatggtcgtatttcttctcactcttaatcaggctgaaatcatcaggaatataagggttaagctctggcaaagagagcgcaatgtcggcggcttttttctgccagtcggcgaaagtttgtgcgctgattttatcgacctgatacggcgcatcgacaaagtaagccgttttgttgtgcggctctttcgggctgatataccagatacgcgcattctgcggcgtcatcatcgccagacgttcctttactgctttagcatcgtaccgatcggcaatattgactgcatccagcgtatgctcaacaggaacgcgaatcatggtatctgccagccattcgacgtaatccatatcacgggtgatgctcggataacggaagtcgatatccagcacattcgccagttcatcgaagtattgtttatcaatgcctttttcacgtaacagattgagatagctaaaaattgccgccacaacctgatcgcgattagccaggcctttatcggttaaagacgcagagatcgctaatacgccgctgttgccgttgacgataggatcggagttggcgctaatgccctcaactaatccctgcttttgcagccagtcagaaagtgtacctgggctgcgattgccaatcagataggtaatcaattcatcggttttactacggaacttcgcactgttgttatcgatgcgaaactcaacgcgcaacactttacgcggcagcgcagggacgtaatgaatgataatgcccttttgcgcgtcggtgactaccggcacggtgatttccggttttttgctctctttgttcggcacgcgaccaaaggtgtccgccgccatttttgccaactccggcagcggtttattactgtaaataaccgccttcatcaaattggcggaatagtacttctcgtggaaatctttcagcgcctgctgcaccggattaccaggtttgtcgcttaaagtttcgaggttaccaccagaaaacttactaccggggtgtgccgggttaatggtttctgcgctgacctgtgccatgcgcatcccgtcacgcgtacgcgccatggttaattcagcgttcaccgcattacgctcacgttcggcatatttcttgtcgagcaaaggttcagcaatagcatcggccaggcggtctaccgcaccaggcaaggcgtcgttctcaacttccagatagaaagccgtgcgatacggcgcagtgctggcattgtgactaccgccgtgcattttgagatattcggccagactgtcagcctgcgggtactttttgctccccatcagactcatatgttcaaggtaatgtgccagcccctggtacgcctcgggatcttccaggctcccaacgggcaccaccagcgcgctgaggcttttaactgcctgcggatcagaaaccagcaagaccaccataccgttatccagacgtatagcctgatactggcggttatctttatcacttttacggatggtttcctgaatcggctgccatcccgtttctgcctgacttaagggtgcccaaagggcaactaacaacaataatgctttgaaccaggtgctgcggggcattcacggacctcataatcaacttaattttctgtccagattcaacacgttaacgcaaatcatctgccagaatttaatcttgtgctgcacgagtcagcctatgtttatataaccatcagtccgtgactggtgcgcatcataaagtaagcggatagattgcgcaatttttatacagcactcaactctgattaaagcgaaacagcggtaacaggaaacgttggctctgttcaacgatggcctccattgtctctggtgttaattgccgccagagcctttgataccagatatcatcaccttcgccacgcaccatcatgttgccttcgtaagcctgaaggaatttcgtacgggctttttgcaacgtggaatcgtcatccagcatggcatcgttttgcgcgtcataacaggtttttagccacgcgccgccactttcaggtaacaccagcaatggcgcggacattccttcacgatacccctcaatcagttgactgaggtaatgcaaagcctgttcggctgcaagcggcggaaaacgccactcgccgtctttgcgtagaaaaaggcgactttcaccattaccaccgctggcacagtagacaaggtgttccagccaaagttgcattccctgggccacacttaataaagagggacgccagcgcaacaggccatccggctgcacctgcggcaaccagccagttatctgcacaccgttgcaggcgagatcaatttccatactctgccccggctggcgacaggcaatgactctgtcggcaagctgctgcatctcctggcactgtgtttcccagaaaatttcaccaaaagcgccatacggtaaatcccctgccgctcggaagcggcggaacaagcgttcggcatcatcctgctcaaccagtgcattcaataactgctgattgatttgataacggctaagtccttccagaataaatggctcggtgtcggggatttcgctgtcttcagtacggaagttcacctgcaaacgcatctggaaaaatgcccgcaccggatgtgcccagaatcgttgtagcgtttccagcggcacggtttccggtaaggtaaacggcagcggctgaacaaattcagaatgtgctttaccagcctggctggccgcaggtagccattcacgagcatagctttgtcgttcgcctggctggtagttttgtggatcaaacggcatccgggtatggaggcaagtaagatgcgcttttacccttgcctcgctttcatcacagttgagcgcttcatcgcccggtagataatgactttgcccgatgtagtcgatcagttcctgcaccagtacgctcgggaaacgctcactgttatcctgaatggaacgaccgatatagctgatatagagtttttgctgcgcggaaattaacgcttccaggaacagatagcggtcgtcatcgcgacggctacggtcgccacgcttcggtttctggctcatcaggtcaaagcccaatggcgcaagctgacgtggataaacgccgtcgttcattcccagcaggcaaaccactttgaacggaatactacgcattggcatcagagtacaaatgttaaccggtccggcgagaaaacgctggctgatacgttcttgatccagacgctgtgccagttcatcacgcaatagactcagcggcaccgcgtcgccatactgcgcacctaaaccttcggcgataatcgcctgccattgttgttcgatcagcgtcatcgccgcttcggtttccgcatccggcaggaagaaggcgttgagcatatcgcgacaaaccggcaaccactcttccagcggacgctcctgtgccagcccgcgacgccagatgtttagctgcattagcagactagccagatgccccaccagttctgcaattaagccgctgctttcatcataaggtagaacgctttgccactcgccctgcgcgctctccatcgcgtagcccaacaacatacgcgtcaggccaaatcgccaggtgtgttgtccggtggcggggagttccagctcgcgaacgttgtcgtcatctatgccccaacgaatgccggattcgttgacccactggcgtaaataacgcagcccttcttcggtgatgtcaaaccgcgccgccagcaccggcacatccagcaacgccagcacatcctcactcacaaaacgactgtcaggcagacttaacaggctgataaacgcttccagtaccggatgactctgccgcgcacgacggtcggaaatggcgtaaggtaggtaacgatccgcaggtgcgctaccaaacacagcctgaataaacggactgtagctgtcgatatcagccaccatcacgatgatgtcgcgcggagtaagtgtcgggtcttcctccagcatcgccagcaggcgatcgtgtaaaacttcaacttcacgctgcgggctatggcaaacgtggaaggtgatactgctatccagtggatcaagcgggcgtttgttatcgctacgggaaaactcttcgatgttcacaccagcaacggcgcggttttccagttccagaatgtcagactgaatgttatgcagcaggttatctggcgtgacatcgacaaaggcgtccagctcctggctgctctccaggtcagaaaggagataaatgtagtcgcgcccaagcttaccccaactagccagcagcgggttgccgacatcctgttcaccatcgctgttaaagagctgcccggcattttcgctatcacgaaatagcggcaattcgcgatcttcaaaactgtgtcgacgctgacgggtcagcagtttcgccagataagcaggatctttaatatcgccccagtaataacggcaggggttggtaaacaggagatggatttcaatatgtttacccagcgcctgtagcgcctggagataaacaggcggtaacgcggaaataccgcatataaagacgcggctaggtaaccccggcgggcaggtcgtcgcggactccagcgtttcgataaagcgctgatagagattggcgcggtgccagcgcggttgcccgagttgatgggtatattccaccagcgccttccacaacggggcttgccaggcctgtgcttctcccagcccttcaaccaaatgtcctgtttcccactgtgccagccagtccggacgatagaccagatactggtcaaacaggtccgccgctttactggaaagctggaacagttttcgcttgtcgctatcgtcagtcagataatgccgcaacagggtaaagtcttcgcgctccagcaattgcggcagcagagtcatcagtttccagctcatgctctgtttgttaaaggcgctctctttggggatttccggtaacacccggacgaacatatcccagataaagctcgctggcagcggaaaatcaatgtttgccgcaataccaaacttttggctcagggtcatttgcagccactgtgccataccggtactttgcaccagaatcatctctggttcgaaaggatcgtccagccgttcgcgttcgacaataaactccatcaacgcttccagcacgtccagacgattggaatggtagacccttaacatagcggctcctgattactgacgattcgggcaatgcaggcgggtcatctcgccttctctgcccccgggactaactagcgtaacgctgatgctgacacatcccgcctggcttgtctgcattcggttgacctgccagttggcaggtgggctaatcgcgcgcagttgcgtttgctgccagccatgccgccagagctgttggtactggtttctgctggcaagactgttcattaatgttcgctggaaaccgcttaacgcagtgacaatcatcaccatcaacaccatcgccaacattacctccggcaggctaaagccttgttgattcttcagggaagcactcataacgccctctctttcagcggttaaatcagggaagctgacataacgccctctctttcagcggacaaaaatcgctccagccgcgtgggctaaaaacaatgtttccatcaatgacttcgcctgttcgccacaagctaacgccttcataaccggcaatcaataaggcttcattatctgccagtaaacgcaaacaaacctgggcatcggtttcagcgtactggctgcactgaactgctggctgcgtctgccagcagtgcatttttccccacgccagcgcgctctgaacgatggcctggcggcgcaaactctgactttccatgctcacgcgagaggcaaaactgcgatcctgttggctcattccttgtaatagcaaactacccaaaaccagcagcatcaggaccagagccagactgctaacacccttttcgcggttcacaggttgaatcctgtcacgctatagctggcattcaccacggtttgcggttcagacttactggcagcacgcatattaaccgtcaacaccgggctgaagccgctgacatcctgacgtacgacctgaaaagtgtcgataatgatggcatccggattagtgactttatcccagcccttaccttcacaggatgtcgcaccgcgtagcgtttccagcacatgctccttcagacgaaatccaatctggtcggactcttttaccggttcgcgatcccagataccgttactgttcgcatcccactgcacaatgacacagtcaccctgtccgacaatttccagcccttcgccggtacagatgccatgacaataacccgccctctggagatgcttcgcgacggtaaatacccgcagccagatttcatcttccagcgccagcttacgggtgctcgttaaactttcacgctgtaacgcaggcagaaagcgtgccgcccccagcaacaatacgctactgatcgccatagcaatcaacacttccagcagagaaaaaccttgctcttttacaggcatccttctgtttctccttgctgacaaagccggagtcttccccacgggctaaccaccagccaccactcgcccgtactgtttttgaagcgaatatgcccggcccatgcggtattgcgcaggccaaagaaagcaaggctaggtgtcaggtcgctcatttcgacttcgggccagcgtggcacaaagaccaatggactactgccatgacaggtattggccccagcagcggaactcacaaggcaccataacgtcccctccctgataacgctgatactgtggtcgcggttatgccagttggcatcttcacgtaaatagagcaaatagtcccgcgcctggctggcggtttgccatagccgttggctctgctgccagtattgccagccatagagtccacttgcgcttagcatgaccaaaatcagcatcgcgaccagcgtttcaatcagcgtataaccacgttgtgttttcatgccggcagtatggagcgaggagaaaaaaagacgagggccagtttctatttcttcggcgcatcttccggactatttacgccgttgcaggacgttgcaaaatttcgggaaggcgtctcgaagaatttaacggagggtaaaaaaaccgacgcacactggcgtcggctctggcaggatgtttcgtaattagatagccaccggcgctttaatgcccggatgcggatcgtagccttcaatctcaaagtcttcgaaacggtagtcgaagatggattcgggtttacgtttgataatcaacttcggcagcggacgcggttcgcggcttaattgcagatgagtttgatccatatggttgctgtacagatgcgtgtcgccaccggtccagacaaaatcacccacttccagatcgcactgctgcgccatcatatgcaccaataacgcgtagctggcaatgttgaacggcaggccgaggaagacgtcacaggagcgctgataaagctggcaagagagtttgccgtctgccacatagaactggaagaatgcatggcacggtgccagcgccattttatccagttcgcctacgttccacgcactaacaataatgcggcggctatccgggtcgtttttcagctggttcagtaccgtagtgatctggtcaatatgacgaccatctggcgttggccaggcgcgccactgtttaccatacactggcccgaggtcgccgttttcatcggcccattcgtcccagatggtgacattgttttcgtgtagataagcaatgttagtgtcgccctgcagaaaccacagcagttcatggatgatggaacgcaggtggcaacgtttagttgtcaccagcgggaatccatcttgcaggttaaaacgcatctgatgaccaaaaatggaaagcgttccggttccggtacggtcgtttttctgtgtgccttcgtcgagcactttttgcatcagttctaaatactgtttcatggttcctcaggaaacgtgttgctgtgggctgcgacgatatgcccagaccatcatgatcacacccgcgacaatcatcgggatggaaagaatttgccccatgctgatgtactgcacccaggcaccggtaaactgcgcgtcgggctggcggaaaaactcaacaatgatgcgaaacgcgccgtaaccaatcaggaacaaaccactgacagctcccattgggcgtggtttacgaatatacaggttgaggataataaacagcaccacaccttccagcagcagctcgtaaagctgacttgggtggcgcggcagcacaccgtaagtgtcgaaaatggattgccactgcgggttggtttgcagcagcaaaatatcttctgtacgggagccagggaacagcatggcaaacgggaagttcgggtcaacgcggccccacaattcaccgttaataaagttgcccagacgcccggcaccaagaccaaacggaatgagtggtgcgataaaatcagagacctggaagaaggaacgtttagtacggcgggcgaagataatcatcaccacgataacgccaatcaggccgccgtggaaagacatgccgccgtcccagacacggaacagatacagcggatcggccataaactgcgggaaattgtagaacagaacataaccaatacgtcccccgaggaagacgccgaggaagcccgcatagagtaagttttcaacttcatttttggtccagccgctgcccggacgattcgcccgtcgtgttgccagccacattgcaaaaatgaaacccaccagatacatcaggccgtaccagtgaagcgccacgggtcctatactgaaaatgaccggatcaaactccggaaaatgcagatagctactggtcatctgtcaccacaagttcttgttatttcgctgaaagagaacagcgattgaaatgcgcgccgcaggtttcaggcgctccaaaggtgcgaataatagcacaaggggacctggctggttgccggataccgttaaaagatatgtatatgatccgcgttataaccctccgcgaatcagcccgcccatgccgcgacgctccataaaggctgcaacctgatggcgaacttcggtcgccagttgcgcttccagactacgctgcgcaagattttctgcttcggcataatcaatgcgccgcagcaggtattttgcccgcgctacagaacgtccgttcatagacagatggcgatacccaagcccaatgaggattgccacgcacatgggatcgcccgccatttcaccgcacaaacggagatcgattccatgtatttccgcttcccgggcgatcatcgccagagctcgtaacattgcaggatgaagactgtcataaatgttcgccacccgggtattgttgcgatcaacggccagaatgtattgagtcagatcgttggtgccaacagagatgaaatcgacccgctttgccagatgcggcagcataaataccatactcggcacttccagcatgatgccgatacgtggtttgggaatttcgtaaccgatcatctcctcgacttcacgtccggcacgttcaatcaggcggcgtgcttcatcaacttcatcgaggcttgtgaccatcggcaacagaatattcaggttgcccgtagcggcattagcacgcagcatcgcccgcacctggatcaagaagatctccggctgatcgagcgtaatgcgaatcccacgccaacccaggcatggattctcttcgctgatcggcatgtaaggcagctgcttatctgctccgacatccagcgtacgcaaggtgacgggtttatcattgaacatttgcagcatcccctgatactgcgccacctgttcttcttcgctcgggaaaccactttgcagcatgaatgggatttcagtgcgataaagaccgatgccatcaatacggctgcccagtttttcttcatgttccgggcttaaaccagcattgagcatgacttttatacgctcaccgctttttaactgcgcgggtaaattgacgtcatcttccgccagacggctaagctcaatctcttcactaattagccgctgatattcttgcagcagtaccggctccggatcgaccagcaattcaccgcgatagccatcaacgatcagcgtcctacgatgcagcacgctaggctgaatatccgcgcccatcacggtagggatccccagcgcacgtaccatgatcgcagcatgggagttggctgcgccatctcgcacgacaacaccgactaagcgatcctggggcagctcagcaagcgttgtcgcactcagttcatctgccaccagaatgaaacgttccggccaggcgttcggcccttgattagcgtcatcaagatgaaacagcaatcgctgacccagcgcacgtaaatcgccagcccgctctttgagatagttatcacttagcgcggcaaactgttcggcaaatttttcaatgaccgtttttaccgcccactctgccacgctgcctttatcaacctcggcaaacaattcgcgacgcagccgggtgtcgctaagcaggtggctgtaaagatcgaaaatagccgccgtttctttttgtgcaccggcggcaaagcgtttgctgtagcggcgaaactcgtttgccgcttcttccagcgccccggtcagtcgttcgcgttccagagccggatccagcgtacttgcctgatacacctgttccattaaaggtaacgtggcatcctgccagccttcggcaatcgccacaccaggtgctgccggtaatgcgcggattcgcgtctggcgatattgcccaaacaaggcagtcaactggctctgagaaagaatagctgccatctgggtggcaagcgtcaccaggaaggattcttcactttcgtcatactggcgcaactctcgttgctgtaccaccagtacaccaagcaactggcgacgttgaataattggtacgcctaaaaacgcgcggaaacgttcttcttttacggaggggatgtatttgaagctggggtgcttttgcgcatctgcaaggtttatcggttccgccagcctgccaaccaggccgacgatcccttcatcaaacgcgagcgttacagtgcgaccgcgtggttttttcagcccccgggtcgccatcaggtagtaacaacgtcgatcatgatcggccaggtagacgctacagacctcggtatccatcgcaagacagatgtcggtaaccagaatatttaacgcctcattcaggcgtggtgcgctggctaccttttcgactatttcgcgcaggcgagtgagcataattggcgtgacttaacctcttttacgtcgataagcagatgcgttttgtggttttggcgtattttcctgcagactcatcaccacactcgcgaactctttcattaccctacggtagacatcacgtttaaaactcaccacctgtctgaccggataccagtaacttacccatcgccagccgtcaaactctggtgtactgctggtttgcatattgatttctgcatcgccgctcaccagctgcaagagaaaccatttttgtttttggccgatacaaaccggcttcgtgtcccaacgcaccaaacgtttcggtaatttgtagcgcaaccagttacgcgtactagcaaggattcgaacgtctttgcggcttaatcctacttcttcaaacaattcacggtacatcgcctgctctgcggattctccggggttgattccgccttgcggaaattgccaggagtgctgaccaaatcgccgggcccacattacctgcccctggcgattacaaatcacgatacctacgtttgggcggtagccatcgtcatcaatcaccggactacctcaaaataaagctttatatacgaatgattgtttcatactccaggaagacggtaaaccactctctgcagggcattacacactaataacaattgaataactcacagttatgtgcagagttataaacagaggaaggggtggatagccgtttttattcaccttttctgtggatagagttgtgaagaactacggaattactacgggaaaacccggagcattctgaataagcccgatatagacattttaaaatattcattatcagtcaatgcattacatgtaattttagtaatgaaaaagagtaattcgtgacccaggtcacacctctcatttacgggttggcgaaagatcaaccaatgccgtatttatccacagaatgtgccactaagttaagcactgaaccactaaaaactggagtttcgtcgcacgtcaaggctgtaaatggaaacagtagtggaggtttttcacagttatcccagctttctgtggataacatggtgtaagatcctgtttattttcagtgaccagatttggaaaacccgttgcagtgttgcgcaactcgattaccggcaacctaaaaagcaatataaatcagagaattgaacaacgcatgtggaaaaagttacactgcgaatattcggcacataattgctgtttgttttttaatcaaggtatcatgacatgtcccaacctcgcccactgctctctcctcccgaaactgaagaacagttgttagcgcaagcacagcaactttctggttatacattgggagaactggcggcacttgtcgggctggttacgccagagaatttaaaacgcgataaaggctggattggcgtgttactggagatctggctaggtgccagcgcagggagtaaacctgagcaagattttgctgctctgggcgtggaacttaaaactatccctgtggatagtcttggtcgtccgctggaaacaacattcgtttgtgttgccccgttaacgggcaatagcggggtgacctgggaaaccagccacgtgcgccacaaactcaaacgcgtactgtggataccggttgaaggcgagcgcagcatcccgctggcgcagcgtcgcgttggaagtccgttgctgtggagcccgaatgaagaggaagaccggcagctacgcgaagactgggaagaattaatggatatgattgttctcggtcaggttgagcggattaccgctcgtcacggggagtatttacagatacgaccgaaagcagcgaatgcgaaagcgcttaccgaagccattggtgcccggggcgaacggattctgacgctgccacgcggcttttatttgaagaagaatttcaccagtgcactactggcccgtcattttctgatccagtaaccatcgctttgacctgccgctttccgggcatataattaccgcttcatttttttggcagggctttttagatgttatttgcatggataaccgatcctaacgcctggcttgcgctcggtacgctgacgctgctggagatcgttcttgggatcgacaatattattttcctttctctggtggtggcaaagcttcccacagcacaacgtgctcatgcgcgccgtctggggttggcgggagccatggttatgcgtctggcgctgctggcaagtatcgcctgggttacgcgcctgacaaatccgctttttacaatattcagtcaggaaatttctgcccgtgatttgattctgcttctgggtggcttgttccttatctggaaagccagcaaggaaatccacgaatccattgaaggtgaagaagaagggctgaaaacacgcgttagtagtttcctcggcgctatcgtgcagattatgctgctggatattatctttagcctcgacagcgtgattacggctgtgggtctgagtgatcacctgtttattatgatggcagccgtggtgattgccgtaggcgtgatgatgttcgccgcgcgcagcattggtgattttgtcgaacgccatcctagcgtaaaaatgctggcgctctctttcctgattctggtgggctttaccctgattctggaaagtttcgacatccacgtaccgaaaggttacatctacttcgcgatgttcttctctattgcggttgaaagcctcaacttgattcgcaacaaaaagaatccgctctgatactccgtacgctctcctgcgggagggcgtactcactccttttaccctcacagtttaagattttcctgctttcaagatatataacgtcggtttataaacagactattatcataggtaggccaaatgaggataaccggatgaaaaaatgggcagtaataatttctgcagtcggactggcgtttgctgtttccgggtgttccagtgattacgtcatggcgaccaaagatggccgtatgattttgaccgatggaaaacctgaaattgatgatgataccgggctggtgagttatcacgatcagcaaggtaacgcgatgcaaattaaccgtgatgatgttagccaaattattgaacgttaacaaataaggtcagcatccggctggccttaagatttttctctttcccttttcccttccctctgccatttttatattccttatgtcgtgattataaaaaggaaacggctatgcaatatcaccgtataccccacagtagcctggaagtcagcacgctggggcttggcacgatgacgtttggtgaacagaacagcgaagccgacgcccacgcacaactcgactatgccgtcgctcagggcattaaccttatcgacgttgccgaaatgtacccagtacctccgcgccccgaaacgcaagggttaaccgaaacctacgtcggcaactggctggcgaaacatggcagccgcgaaaagttaattatcgcctccaaagtgagcggaccgagccgcaataatgacaagggcatccgcccggatcaggcgctggatcggaagaatatccgcgaagcgctgcatgacagcctcaagcgcctacagactgattacctcgatctttatcaggtgcactggccgcagcgcccgaccaactgcttcggcaaactcggttatagctggacggattctgcgcctgcggttagcctgctggatacgctggacgcactggcagagtaccaacgcgcgggaaaaattcgttatatcggcgtgagcaacgaaactgcatttggcgtaatgcgctacctgcatctggcggacaaacacgatctgccgcgtattgtcaccattcagaacccttacagtctgttaaaccgcagttttgaagtaggtctggcagaagtcagccagtatgaaggggtcgaactgctggcctatagctgcctgggtttcggcacgctgaccgggaaatatctcaatggtgcaaaacccgctggcgcacgtaatacgctctttagtcggttcacccgctatagcggtgagcaaacgcaaaaagccgtcgcggcgtatgttgatatcgccagacgtcatggcctggaccctgctcagatggcgctcgcgtttgtacgccgtcaaccgtttgttgccagcactctgctgggcgcaaccacgatggatcagctgaaaactaacatcgaaagtttgcatctggagttaagcgaagacgtattagctgaaattgaagcggtgcatcaggtttatacttatccggcaccataagattaacgccggttaaaaccggcgttaaatattaatgacggcgctgccagatccacagcgccgttattgccagcgcaaacagcgcaccgaagccaatgccaatgggcacgaccgggatgcctatcattaccgccaggctgtaaatgcccagcatcaacaacatggcgctgttttcgccaaggttttgtactgcaatcgcattccccgccccgacgctttttttaccccgctcctgtagcaacgcattgagcggaacgacaaaaaagccccccatcacgccaatcagcatcaacaaggcataggctggcagcagctcgtgttgcagggaaaaaatcagtaccaccacgccaatcaaaatcccggctggcatacagcgactcacggtttccagcgtaactaacttcgctgccgcacctgcgccaaccacgataccaatcgctaccatcgcgttgagataggtgggcgtagcgttatcggtaatgcccagcgccaccggtacccacagcaccaacaggaaacgcagcgtgacacccgctccccagaataaactggtgcccaccaggctaaaacgcgtttcaccattgcgccataggctggtgcaggcattcaggaaactgcgggtcatgttgatgagattccaggactgccccggacgcgccgccgccagtttgggaatgtagatattggcaacgaccgcaccaccgtaggccagtgcgcatgcggccagggcgacgaggacatgccagtcagccagcacaccaccggctacggaaccgagcaaaatcgccgctatggtagaagcttccattaaaccgttagctttcactaacttactacccgtggttaattcgccgagaataccgtatttcgccggactataggctgcagcaccaacacccaccagcgtatagccgagaaacggattgataccaaagcagatactggctgcgcccagcagcttcaggccgttggcaaacatcatcacccggcctttggcgaagctatccgccacctgcccgacaaacggcgcaaaaagaatgtaagcacctacaaacaccatttgcaggatgggctggctccactccggatagaactgcgctttcagtaacgccagagtggcaaacagtagggcattatcgccaaacgcagagagaaactgcgccacgataaccgctttcatccccttgctccacaagctagtgttagtgtgcacactctcactcatcgtgttgttccgcttcgtctacccagcttttcaacgtgacaaagtcaggtttgccgctgccaagtaatggcatctgtttcagatagcgaatatcgcgcggtacagcaagctccggcacgccgtgctcgcgggcatactgttgcaacttatcgcgcgtcagttcgttatctgtggtgaaaagcaccagtgcctcgcctttgctggcatcgctcttaatcgcagtggcatggactttatctgggctaacaccaagtgccagttgttccaccatttccaggctcaccatttcgcctgcaattttggcaaagcgttttgcgcggccctgaatctgcacaaagccctgctcgtcaaaacgcacaatatcgccagtgtcataccagccgcgctccatttcgccgcgaacattctcggcggtgggcacttccagtacacctggcttctccacccgcagatagccgttcattatgttcggccctttcagttgcaggcgtccgccctcttcgataccagggacgctcaacaggcgcgcatccattcctggtagaatacgccctaccgtaccgggtttcgccgccatcggtacgttgatagaaacgacaggcgcgcattcggtcacgccgtagccttcaaggatgcgcaggccaaatttatcctgccaaagctgtttggtactttcttgtaatttttctgcgcctgccaccacatagcgtagacgatagaagtcatacgggttggcgaaacgcgcgtagtgaccgaggaaagtgctggtgccgaacaacacggtgcaactgcggtcatacaccaactccggcacaatgcggtaatgcagcgggcttggataaaggaacacttctgcacctgtaagcagtggcgtaaacaggcctaccgtcagcccaaaggagtgaaacagcggtaacgcgctcataaagcgatcgttggtggtgaagtcggcaatcgttttaatctgctcgacattcgccagaatgcttttatggctatggacgacgcctttcggatggccttcagaaccggaggtaaaaaggatcagcgcctcttcttccggctgctgtttaacctgtgccagacgcggcatcagcaaatgagcgaagatccatactttgtcggcagtggtgacatctgcttttaaatcttccagatagacccagcgcacctgagtaagttgctccggcagatgccagagtttgcctttatcgagaaactggcgggaagtgaagatggttttgatttcagccgccgtaatagcactggtcagcccttttaccccggcagtgtagttcatcattgcgggcatgcggcgacgggcgatggccccaaaaatcactgccgcactgatgcctgcattgggcagcattaagccgatgcgttcgccttcaacactgtatttttcaaggatgcgtccaacaaacagcgttttcgtaagcaatttgcgataggagtctggggtaaagttgacgtcttcgacacatttcttcccggctccgaagcggtacattgcactcagtaaagattcgtacagcgtttcacgcgggcgcaccgccattcgcgcttccatcattatttgatgcagcatttcgccagcgattttgcgacggtcacgggcacgcggcgcatccggcatcgccacctgcgttggtggcaaaatatgcagagtaatttgcgggaacaagcgacgtttaaccagacctttcaggcggctgaagtgcgtaagttccgccccttcaatacgcacaggaataaccgttgcaccagacttcgccgcgacaaaacccgcgccatcgtagattttcatcaggctgcctgtcgtggtgatgcgtccttcagggaaaatcaccactggtcggccctgttccaccagacgtaccagatgtttaatagccataggttgcgtcgggtcgagaggaacaaagtcgataaaacttttcagccaacgcatataccactgttggcttatactggtgtaaacggcaaacactggacgcacaggtaaaaacagtccaagcaaaatgccatcaataaaagagacgtgattaggcgtaattagaacgcgctcgcccttcagtgcctgggtgtcacccgtaacgcgaacgcgatacaaaacacggcacaaatttcgaaaaaagctaaaaagcattccaactccctttgctctgattcagtaaaagcgaatggagggagattacacgagataaagaacgcgagcgacagtaaattaggtgcgaaaaaaaacctgcgcatccgcgcaggttggtgcaagagacagggtacgaagagcgtaccgaataatctcaccaatcaatacctctgggatcttgattgtggtctgcacgacgactcttcgccagcgagaaaacgcaaaggaatgaagggaaatgcaacgaggtgtgtaaattgtcggttactgttacagattgatgaccggcaaaaaaaacctgcgcatctgcgcaggctggtgtaattcatgtgctcaacccgaagttgacttcacctatcaatacctctgggatcaccactttagcaacctgaagccaaacgccaccagcggtcaatcgcaacagcgtttcgcaaagtgtaaccaaaggtttgcaatctctttttttgtcttacttatttgcgtttggctcacattcccacgatgaaaacacgccaccccttgaaccaacgggcgttttccgtaacactgaaagaatgtaagcgtttacccactaaggtattttcatggcgaccataaaggatgtagcccgactggcaggcgttagtgtcgccaccgtttcccgcgtcattaataatagtcccaaagccagcgaagcttcccggctggctgtgcatagtgcaatggagtctcttagctatcacccgaacgccaacgcccgtgcgctggcgcagcagaccactgaaacggtcggtctggtcgttggtgatgtttccgatccgtttttcggtgcaatggtgaaagcggtcgaacaggtggcttatcacaccggtaattttttattgattggcaacggttaccacaacgaacaaaaagagcgtcaggccattgagcaactgatccgccatcgctgtgctgcgttggtcgtccatgccaaaatgatcccggatgctgatttagccagtttaatgaaacaaatgcccggtatggtgctgatcaaccgtatcctgcctggctttgaaaaccgttgtattgctctggacgatcgttacggtgcctggctggcaacgcgtcatttaattcagcaaggtcatacccgcattggttatctgtgctctaaccactctatttctgacgccgaagatcgtctgcaagggtattacgatgcccttgctgaaagtggtattgcggccaatgaccggctggtgacatttggcgaaccagacgaaagcggcggcgaacaggcaatgaccgagcttttgggacgaggaagaaatttcactgcggtagcctgttataacgatagtatggcggcgggtgcgatgggcgttctcaatgataatggtattgatgtaccgggtgagattagcttaattggctttgatgatgtgctggtgagtcgctatgtgcgtccgcgcctgaccaccgtgcgttacccaatcgtgacgatggcgacccaggctgccgaactggctttggcgctggcggataatcgccctctcccggaaatcactaatgtctttagtccgacgctggtacgtcgtcatagtgtgagtactccgagcctggaggcaagtcatcatgcaaccagcgactaaccgcagttaaagcaattccagcgccagtaattcttcgatggtctggcgacggcgaatcaaccgcgcctgaccattatcaaacagaacttctggtaacagcggacggctattgtagttggaactcatacttgcgccatatgcccctgtatcatgcagtaccagataatcacctgccttcacttccggcaaggcgcgggtttcaacatttcccccttcctgctgggtaaagacatcgccgctttcacataacggtccggcgacgacggtttccaccgttggcgcgtgttccagagaacgaccatcagctgccagggcactgatatggtggtaactaccgtacattgccgggcgcatcagatcgttgaacccggcatcaaccagcacaaagtggcggctccccatttgtttgacgctccgcacctgagtaattaatacgccagactgcgctaccaggaagcgacccggttcaatttccagtttcacagggtggcccaaatggcgggcgatttgctcacgcgcggcattccacagaccataataatgttcggtatcaaccgcctcttcaccctgttgataaggaacagaaagcccaccgcccgcagaaatagcctgtaaatcctgaccgaattcgatgacctgacgcaccatagcaccacacacctgttccagatgggcataatcaacgccagaaccaatgtgcatgtgaatgccgaccagctgcagatgatgacgttgtatcacgtccagtgcggcgggcagatcggtgtaccagataccgtgcttgctgttttcgccaccggtattggttttttggctatgtccgtgaccaaaccccggattaacgcgcagccatacccgatgccctgggctaacctggcccagttggtcgagcatatcaacagaacccgcattcaccggaatttgcaattcactgacgcgttcaagcgtcgcctgatcgataacatctgccgtaaaaacaatatcatcggggtgcgtttgcggattgtaacccgccgccaacgcacgctctatttcgcctaagctgacggaatccactttcacgccctgctcacgcattaagcgcaaaatatgaatattggaacaggctttctgtgcaaagcgcaccacatcaaactgtttcagcgctgcaatctgccgacgaataatttgcgcatcgtagacccacaccgggcagccaaattcagcgggcaaacgcagcagattttcggcggtgagatcggtatcggtgctgaacagactatgtggcataacaaactccagataagtgcttttttatgattacgccacatcataaaaagaataaaaaatatcgatttatgtcgagtctatgcaaaaatgatatggattaccggattgcgagagagcgctaatggccgccgttaacttacgtcatattgaaatttttcatgcggtaatgaccgccggaagcctgactgaggcggcacacctgctacacaccagtcagccaaccgtcagccgcgaacttgcgcgctttgagaaggtgatcgggctgaaattgtttgagcgcgtacgtgggcgattacatcctaccgtgcaaggactgcgtctgtttgaagaagtgcaacgatcctggtacggactggatcgcattgtcagcgccgcagaaagtctgcgcgagtttcgccagggagaactgtctattgcctgcctgccggtctttagccaatcttttttaccgcagctcctgcaaccctttctggcacgttatcccgatgtcagcttaaatatcgtgccccaggaaagtccgctacttgaagagtggctcagcgcccagcgtcatgatttaggactcactgaaacgctccatacgcctgcgggaacagaacgtaccgaattactctctttagatgaagtgtgtgtgttacctccgggtcatccgctggcggtaaaaaaggtattaacgccggatgattttcagggtgagaactacatcagcctttcccgtactgacagctatcgccagttgctggatcagctatttactgaacatcaggttaaacgacgcatgatcgtagaaacccacagcgccgcgagtgtctgcgcaatggtacgggcgggggtaggtattagcgtggttaacccgctcaccgcactagattatgcggcaagcggtttagtggtgcggcggttcagtattgcggttccgttcaccgtcagcctgatccgccccctgcaccgcccgagtagtgcgctggttcaggcgtttagtgggcatttacaagcggggttaccgaaactggtcacttctcttgacgctattttgagcagtgctacgacagcataattagctcagcataaaagcgacagcatcctcggcatggatcgccgcggtatcaaacacaggcaaaacactgcgctcttctggcaccagtaaaccaatttctgtgcagccaaaaatgacgccctgtgcgccctgttctgcaaggcgagcaatcacttgcgcacaataagcgcgactcgcttcggtaaattgccccagacacagttcttcaaaaataatctgattaattttcgcccgttcatccgcttcaggaataagacaattgatggaaaattgttccgtcagccgcccgcgataaaaatcctgttccatggtgtaacgcgtacccagcagcgccacacgagtcattccggccccggtaattgcacgtccggtggcatccgcaatgtgtaagaaaggcagagtgcaacgactctcaatggcatccgccactttatgcatcgtattggtacatagcacaataccttctgcgcccgcccgctgtaagccaagcgccgcctcagccagaatgtccccggttttatcccattccccgcgacgctggcactcttctatttcatgaaaatcgacgctatgtagcagcacttgcgcagagtgaagcccaccaagccgctgtttaatgccttcatttatcaaacgatagtaaggaatggtggattcccagctcattcctcccagcaaaccaattgttttcattcctctctcctgatgtgtgttaccgcaacaaggctgaataaggaacgagacaaacgcctcaacggccaagtgcccaatctctattaacgaaaaaagggccggatgtacagcacatccggcccgtgaaatcagacgccgatatttctcaacttctcgcctgccatcagtttgcgttcgatatgttccagcgtgacatttttggtttccggaatgagccagaaagtaatgcccacaaacgcaatgttcagcgcagtgtagagccagaacgtaccggcagcgccaatgctatcaagcagtgtcaggaaggtcgcgccgataatcatattgctcacccagttcgtggtggtgctacaggtaataccgaaatcgcggcatttcagcggctgaatttcagagcacaggatccacaccactggcgcggcgctcatcgcataaccggcaatacacatcatcgtcatgccaacagagagccaggacaagccactggaagccgtaccgttatcaaactgcatcaggcaatagcccagcaccagagtgcctaacgccatcacgctgaaaccaattttcagagccggtttacgccctgctttatctaccgtaaacaccgcaataaaggtggcgaacataaaggtcagccctacgaccagagtcgcaatcatctgttgttctgtggtcgtaaagcccgccattttgaagatacgcggcgcgtagtacatgatgatgttcataccggtaaactgctgcatcgcctgcaacaacataccgagaaacacagcacgacggacgttacggttgatcttaaacagtgcccaaccgccctgttttaacttcaggctttcacgaatttcgttgagttcttctcgcgctttttcgctcgtatcgcgcagcatacgcaatacttcttccgcctcaatatgacgccccttttccgccagccagcgcgggctatttggcaggaagactaccagaataatcagcagaactgctggtaaagcaagaacccccaacattgcgcgccagttaccgctataactgaacgctgtatcggataaaaacgccagcacgatgccgagtgtgaccatcaactggtacatactgatcatcttaccgcgaacgttttcacttgccatttcagaaagatacagaggagcggtgtaagacgcgatcccgacagcaatgcccagcaccacacgagcggcgattaacatctctacgctggtcgcaaaagcggaccctatagaaccgagtacaaacaggatggcccccgccatcaggctgtatttacgccccaggcggaagctcagccaaccattaaacagcgcaccaattgctgcaccgagcatcatgctactaaccacccattcctgcaaacgactggtcagcacaaagtgatcggtaatgaacggcaacgctccggcgattacgccgatatcaagaccaaataacaatcctgcgaccgcagcagctacgctaacaaacatattcatacgccgcgtatcccgcaaagaacgtggcgttaaagcagattccgtattgatagtaaccattttttcctgccagcagagagtaagacatagtgaaaaaatacgtgaacaactcacgcaggtgtcaggtcggaaacagcataaatatggattaaattgctgcgacatgtcgttatgtgatggatattccaattttcaaattaagttgaattattgagattattattaaccacctaattttacagcagataaaattcataaagttcattaattgataattaatatggattatttcataaccatgatatggattatgatgatctacaggtataaaaaaccctgccatgcggcagggtcataaaagtaagaagaatgaattaacgcgccagccaaccgccatccacggcaatggtataaccattcacataatcactagcgctggaggcaaggaacactatcggccccatcaggtcactcggcagtccccaacgaccagctggaatgcggtcgagaatttccgcgctacgttgttcatctgcccgtagttgttgagtattgttggtcgccatgtaacccggggctatcgcattaacattaatgttgtgtttagcccattcgttcgccatcaatcgcgtcacacccatcacgccgcttttacttgcggtataagaaggcacacggatcccgccctggaaggagagcatactcgcgatattgataatcttgccgccattgccttgcgcgataaagtgtttcgccgctgcctgagacatgaagaatacgctcttgatattcaggttcatgacatcgtcccagtccttttcgctgaactcgagagcatcttcgcggcgaatcaatccggcgttattcaccaggatatcaatatgaccaaactccgctaccgcgcgatccagcagtgctggaataccatcaatctttcgcagatcggcggtcaggcttaaaaaacgacgccccagcgctgtgacctgctcgatggtttcagtcggttcaacgatgttaatgccaacaatgtcacagcccgcttgcgccagccccaacgccatcccctgacccagtccagtatcacaaccagtgacgaccgcaactttaccttcgagagaaaatgcacttaaaatcataacaataccttattcgtttatgcccacaattagcgcaaatctttaacggccacatggtccatatcatcaaagacctggttttcaccgaccatgccccagataaaggtataagctttggttccgacaccggaatggatgctccagctcggggagatcaccgcctgctcgttatgcatcacaatatgacgcgtttcttgcggctgccccatcatgtggaaaacgcaggcgtcatcatccatattgaaatagaaataaacttccatccggcgctcgtgggtgtgacacggcatggtgttccacaagttacccggagccagctccgtcagccccatactcaattggcaggtttccagtacatccgggacaaaatatttgttaatcgtgcgacggttactggtgaggttatcgcctaacgtgactggagatacttcgtccggtgtgacttttttggtgggatacgtcgtatgcgcgggtgcgcaattgtaataaaacttcgccggagtgccggtatcaatactggcaaagacaacttcttttgcacctttaccaacatacagggcgtcgcggtgaccgatttcatagcattggccatcgacagtaatcgtaccggcaccgccaatattgataacacctaactcgcgacgttcaaggaaatagcttacgccgagttgtttaccaacttccccgccaacggaaaccgttttagttatcggcataatgccgccaacaataattcggtcaatgtggctgtaaaccatggtgtactcatcggcgacaaataccttttcaaccaaaaattcattgcgcagcccttgggtatccagcgtttttgcgtgcgcactgtggatgctctgtcttacgtccacatcaacctccgataatcagtgaagcgtgaaaatagaaaacgatagtgaaacactgtttcgttttctctataaagggatgatatgcccatgggctagggttttcaattaaaaataaaacaatgtttcatttttaagttaaggattaaaaaaagtgcagtgtcgatcacgaatatgtcatgagaatggaaaaatgagggagcccagaaaatgtatgtcgacttgccagccatcattattcaacagattaatgacggcagatatttatcggtaaggaggaaatgcagagttattcgtcacgttcaatggtcaatgccacaccctggcccccgccgatacaaagcgttgccagtcctttgcgggcattacgtttcaccatttcatgaaccagagaaaccaggattcggcaaccggaagcgcctatcgggtgaccgagtgcgatcgcgccaccattgacattgacccgacgctcatcccactcaagcatcttgccaacgctaagcgcctgtgcagcaaacgcttcattagcctcgataagatcgacttcagccaactgccagcctacacgctccaggcaacggcgggtcgcatacaccggcgcaattcccatcaatgccggatctacaccaacgctggcaaatgcgcgaatgcgggccagcacgggtaaattcaacgctcgtgctttggcttcgctcatcatcattaccgcagctgcgccatcgtttatggaacttgcattacccgctgtcacagaaccgagactatcaaaactaggatttaaacgggctaagccttctgcgctggcgtcagtgcgtggctgttcatcggtatcaacaaccaacgtctgcccgttactttgggtcattaccgggacgatctcatctttaaatcgtccggcgtcaatcgccgctcgcgctttttgttggctgctaagtgcgtaagcatcctgcaactgacggctgatgccatattcgcgagccagattttcggcggtgacaccaatatgataatcattgaaggcatcccacaacccatcatgcacaagactgtcaaccaactggctattgccaagctgtgcaccggtgcggctatcagtcagaacatgtggtgcgcggctcatgttttcctggccaccggcgatgacaatatcagcctcgccacactgtatcgcctgagtagccagatgcagtgctttaagcccggaaccgcaaacgtcattaatagtgattgcagaaacgctattaggcagaccacctttaatagcgctttgccttgccggattctgccctgcccctgcagtcaacacctgaccaagaattacttcatccaccgcatatgcaggaacgccggtacgttctattaacgctttcacgaccagactaccaagttccacggcggaatgacccgctaacgcaccacgaaagcagccgataggtgtccgtaacgccccgacaatcacaacgtctttcatcacaacctcgcaccaattaacagtgcaatagtaaatgattgttaattacagttatcttaattgtttaaaaaaagtgatttttatcacaaaggaaatatgcctgagcagcagtcagagacataactggcacgtaaggtttgcaaccactaacccaccaatagaggggtagatagggcgttaatctcccatacttaacctggtttatggtaaattgccctccattttgtttaatttgtagatgatacgttcagataatgtctaatatttggtctaaagaagaaactctgtggagtttcgcgctctacggcacagccgttggtgcaggcacgctcttccttcctattcagttaggtagcgcaggggctgtggtcctgtttattactgctctggtcgcctggcctttaacatattggccacataaagccttgtgccagttcatcctcagtagtaaaacaagtgcaggtgaagggataacgggcgcggtaacacactactatggcaagaagattggtaatctgattaccacgctgtacttcatcgccttttttgtcgtcgtgttgatatatgcagtggcaattaccaacagtcttacggaacagctggcaaagcatatggttattgatcttcgcatccgtatgttggtgagtctgggtgttgtattaattctgaatctcatttttctgatgggacgtcatgccactattcgggtaatgggatttttggtattcccattgattgcctatttcttatttctttccatttaccttgtcggtagttggcaacctgatctattaacaacccaggtagagttcaatcagaatacccttcaccagatatggataagcattcccgtgatggttttcgcctttagccatacgcccattatttctacgtttgccatagacagacgtgaaaaatatggcgaacacgctatggataaatgcaaaaaaattatgaaagtcgcttatctcatcatctgcataagtgtactgttctttgtctttagctgcctgctttctattccacctagctatattgaagctgctaaagaagaaggggtcaccattttaagcgcgctttctatgctgccgaacgccccagcatggttgagtatttccgggattattgtcgcagtagttgcgatgagcaaaagtttcctgggtacgtactttggcgttattgaaggtgccacagaggtcgtcaaaacaacactacagcaggttggtgtaaagaaaagtcgtgcatttaaccgcgcactaagtattatgttggtaagcctgattaccttcattgtttgttgcattaacccgaacgcgattagcatgatttacgcgatcagcggcccgctcattgccatgatacttttcatcatgcctacgctgagtacgtatctcatcccggcgcttaaaccctggcgttccatcggaaatctgattacgctgatcgtgggtatcctgtgcgtaagcgtaatgttctttagctaatatcagttgtggatggttcaaaattgctacaattttgaaccattccatttttcataatattcatttgttattattccaccctatcacttctctcgtcatatcctagtattatcagttagttaaacacacaaagagatctgaacatcttaaataagactatttaagatgcataacttagattcgcaagatatcttctggtcattcaaaaacaatttgcgatatagatattcttataccatgagatagttatctggaccgctctcaaccatgcaagattaaatcagtgaaacataatcatatttgataacgagaaatgcatttttaaatgccttactcagaattatagcaaatacagattaatcgcaatttttcccggcaaaattacaaaatcatggtgtattgacatcatcaataaccaatgaaattatgcaattatatacggatagggaggttcttaacatggggctttgtagtcgttataaaagtcttacatgcaatagttgcagtatgcattgccaaataatgccagaagagagtccgcgtttgcagtattgcgcaaacagctgtttttgtatgtggcccgaagaaagtagttattttaatcgtggtgtggtagaaggtatcttaacaaaaaaccacaatgcgagattaagcggatatatttttgtcgattttagtgtaagttttttacgtctattccttgaaaaagactggattgactatcttgcaagtactgacatggggattgttttagtcagcgaccgcaatatgcaaagcttagctaattactggcgaaaacacaacagtgcaatatctgctgtcatatataatgatgatggtcttgatgttgccaatgaaaagatcagacaactatttattggtcgttatttaagttttaccggaggtaacacattaactcagatggaattcaccataatggggtatatggtttctggttataatccatatcagattgctgaagttctggatatggatatccgtagcatctacgcgtacaagcaacgaatcgaaaagagaatgggtggtaaaataaacgaattatttattcgtagtcatagcgtccaacattgatactcaacgaccagccagaatcatactctgtttatacgggcatttattgaaatgtccgtattttataaataggccgtcccctcaagagtaaacaccatagtatttaaaaccatcacacgaaaaattcagaagcattacgaaatatgaatttacaaacaatagtggcataaatgttaaccatgttaatttacgtaaagttttacgttgcaacattaaagcctcatttcaatcatcatgataaatataaaattaatatatatttatgccgtaaataccaatatacttagcaaactatgtgatctccatttcgattgatttagtgtttattgacgtatgtactggattattaacgataatatcgagttctggcctgagcaccgaaaattaataagcgtacataacgccgatcttaacgtcgttctgacaacgccagccagtcgatgtttaagtcttctacttgaagcttttcctgatgtggttgcacaacaagattttttcaccagagtctgggaagaagaaggtatgcgtgtgcctactaacacgttatatcagaacatatccattatcagacgcggatttcgcgctgttggtgatactacccacagcctaattgcaaccgtgccgagaagaggattcaagatccataatgacattaacatacaaaatcatgtaataaacagcagtacagacgcacatacacacaatgccccacctgccataaaagttaatgcgggatacaaagagagcattggtggcgcaaagaatttcaataacaaaatcctcaaacatataaaaagtcatctaattatgttgagcgcatttgtcataggcgcatattctgcatattggctatggaataataatcaaccgaagccatttttcaaggattacaagactgttgcggaaattaatggctgccattttaatgtaacagaagatacaattgatgggttgaaagagttcgataaatataaaacacggatactggatagcgggattaactgtaaaaaacatccgtggttatacttccctcttgcaaaatccagtccggggatgattgttatggcatgcaataaaaactataaccaacatgaagtggcaaactgtttaaccctgtcttaccgtgaggttaatcgtgattgattataaaaaaaacttattatttattttagtttttatcagtgggtttattctcttcactgtctattcttacactgcagaaaaaatgatatataacgaaacatgcactgcaaattgggtaatttttaatgaccagggacgagcaaatcttaccatcgactttatgtataacaaaaaaaataaaacaggaactgttgcgttgagtggaacctggcaacaaggtaacagagaaagtaaaagtatacggcgaaatattgaatacacatggattgaaaactatgacacagcccatttaacaagtaagaaagttaataagtttgagattatggatcaagttgatgatgatagacttgcacaacttattcctgatttttatgtctttccagaaaaaagtgtaagctataatatactaaagcaaggtaagcatgcttttattttgagcattggtaacagagcaataatgcattgtgcaaggtaaactaaaatagataacaaaaagatggaacctcgttaatcataaaacaataaaattaaatattctcgcagtatatggcagtctaaagcatcaaagatttgatcaacatctttcattttagacatctccttgcaatgtaaaatatcatgtatcaacaacatctggtgcaaatccaactgtcgaactcgacattcatcttagctcgattattattccttcgtacagtgcttgtaaacaatacagaaagaggattattaagaaccagtttactcagactatcaatagaggaaaggactaacgtttctttaaaagaattgatttcatcatctgttaaactaaactcatcattgacagatcgactgatataactgtttttaactttactctttacgttgactttattgacagaattaacattcacatatctactatttaatgtccaacttgttgtttgcgtgagaacattctcagcattaaggaatttttttaacggaatccttggtttctttttgctgtcgctatttacaatatcatgcatatagaccatttcatgaatctggctaaattcaatgtccattgtatacctcacatttttaccgtgactcgatgttactgttcaataatcaccttccatcaatactaaaattaatacccctaatgtgccgataacaaatatagtcattctacgtaacgtctccataaggtgatatttgacattatcagaagctgcgaattcggattttgctctaatcaaatgagagaaatgtaaaatgaagccacgaaatattaataatagcctaccactgcaaccattagttcctgatcaggagaacaaaaataagaaaaatgaagagaaatccgttaatccagttaaaatcacaatggggtctggtttaaattatattgaacaagaatctcttggaggaaaatatctaacacatgatttgagtataaagatagcggatatttctgaagagataattcagcaagcaatattatctgctatgagcatatataaatttagcataacagatgatttaatgagtatggctgtaaatgaactcataaaactgaccaaaatagagaataatgtagacctgaataaattcactactatatgcacagacgttctatccccccgcgtcaccagacataataaagaaaaaaacaaacgacattctacccttctcaaaaatcccctttttaattttcattgaaaaaatggcaattgatactatgaatccaggtcatacacattaaggcatttatgtaatgtcgtaattaagataactaataaggtgaatattagtaaaacaactaatgatgttattagtttgtagtgaacagtacttttaccaataatgaaaaatataccataagcaatgcaagcttaaaactcataatttaaaaaagataaatataaaaatatcaatgagtcaatcaataataatttggcatcacgagacacatcacagaggaatattatgagcacagaaacaattgaaatattcaataatagtgatgaatgggcaaatcaactaaaacacgcattaagcaaaggagaaaatctggcattactacatggtttaactcctgatatccttgatagaatatatgcatatgcattcgactaccatgaaaagggtaatataacggacgcagaaatttattataaattcttgtgcatttatgcgttcgaaaatcatgagtatctaaaagattttgcaagtgtatgtcagcccaaaaagaaatatcaacaagcatatgacctttacaaactaagttacaattacttcccgtatgatgactatagtgttatttatcgtatgggtcaatgtcagattggggctaaaaatatcgataacgcaatgcaatgtttctatcacattattaacaattgtgaggatgatagtgttaagagtaaagcgcaggcatatattgaactcttaaacgataatagtgaagataatggctaagcattacaatcatttggttaaatttgctggttatagtgcagttaaccactataaccagcacctcttatgttttcttaaatcagcatcttaaaacagttaagagcatactataaatcattatttttcaatgcgttagagaacaatctactttatcaaaattgaataaggctatttcagattacatcactgaattcctaagataaattagtgaacacaaccatagatatgtcaaatgtaatttcctgtagcgttaatgacacataaatatgaatagccataatttctattgcttaagcaggatgcaagaaaccaattttttcatagaggttaactaatggacttagaaaataaattcagttatcattttcttgagggattaacgctcacggaagatggaattcttactcaaggaaatgagcaagtttatattccacagaaagagttaggtgtattaatagtattacttgaatccgctggtcatgttgtactgaaagatatgatcatcgaaagtgtatggaaaaatattattgttagtgacgagtccctgacaagatgtatctattctttgcgctgcatttttgaaaaaattggctatgatcgttgcatagaaacaatctaccggaaaggttatcgtttcagcgggcaggttttcaaaactaaaattaatgaagataatactagtgactattccatagctatattccctttcactactagtttgaatacactggatccattaatacttaatcaggaattagtgcaaatcattagtaataaaaaaatcgatggtctctatacctatccgatggctgcgacaaatttttgtaatgatcacatatctcaaaatagtttcttgagcagattcaagccagattatttcgttacaggaagaataaaccagaataatgcagtgaacactttatacattgagttgatcgacgctaaaaaccttttcctcatcgccagtaatcatctccctgttgatgaactacataatacaagtcaatttattatagataatatccttcaaacggtacataaaccagaacgatctgtaagattagctaagcaggaccaaggatataagaatcattatttaagtgatgaaatgttagccggaaagaaagaactttacgacttcacccctgaaagcatttacagggccatgactatatttgatagattacaaaataaaagtgatatacagacgctaaaaacagaatgttattgccttctagcggaatgccatatgtctttggcacttcatggaaaaagtgaacttgaacttgctgctcaaaaagcattagagcttttagattatgtaagtgacataaccactgtcgatggaaaaattttagctattatgggactgataactggtctgtctggacaagcaaaagtatctcatatcttatttgaacaggctaagatacacagtactgatatagcctctctctactactatagggcactagtccactttcataatgaaaaaattgaagaggcaaggatttgtatagacaaaagtctacaactcgaacccagaagacgaaaagcagttgtgataaaagaatgtgtagatatgtatgtgcctaacccgctcaaaaacaacattaaactctactataaagaaactgagagtgaaagccatcgagttataattgacaacattttgaaattaaagcagctgacgagaatttgtatgcgataaatttttattgacgcaattttattatttagatgtatgcaacttgttatttaaacaacagagataaaaatatctaagatattcaccttattgcaagatatttaaaatgctctagagttaaaagtatgatgtaaagaccattggcctggacaattaaaaaagggagctttatgactaatccaatcggtatcaataatttatctcaaagtagtaatatagcgaatgcaacgggtgatgaagtcgtaagtttagataaacacatcaacaccagtgctactgatacagatcaaatacaagcatttatagttagtacatggatggcgccttttcaaaatgatatgtatagtgaagataatcctatcagtccttactataaaattgagtggtaaacgattgaccaaataaatcataacgagatacttttataatagtatctcgttcctttcattcaatcctcacacatgaaaaaatatgcgctcaccaaaagttaaattcttaaccatcttcacgttttgtatatttattacaaaaatgtctttcgccagcaactcttgctctaatgaagcaggaacaatgttcagaatcgaaccaaatttaattaaagctatcgctcttgttgaaagcaatctaaaaaaggatagcataggcaagaacagagataagaataacaatataaagagtttagattattggttaatgcagataaaccagatgcatattcccctgttaaaaaaacgtggaataataaaagatgaacgagatttgttagataacccttgtctgaacattaaaataggaaccgagattttatataaccattttagtcgttgtggagtaacgtggcaatgcctggggacttataatgcgggttttgcaatggataaccaaaaaaagagacagcaatatgccccaaaatatatattgtatataccaggcttaatgaactaaacaatcgtaaggcttcagcaaaatgagcctaaagcctcttttttttatatagtgcaaacacccatacgtaaagctgttttgatcaactcgataccactgtgaacatctaatttcttcatgatattgagtctatgagtttcgactgttttcctgcttaactgcaagaaattagcgatttctttgtttgttttaccatcagctatgagttgtaatatttcactctcacgatttgtaagttgattatcagaggaatacctggaagatattttttcacaatccatatgtacactatcaaaataagtgtaaccattactaatgctatcaatagcacgatttagtttcgccgggtgactggttttccatacgcatcctttcgcacctgcttcaagcaattttatactatcaatatacggcatctttgctacaaatgtaataatatgagcatctatcttatggcttttaacccattttacgagttcggcccccatcattccacctgcaaattctcctaaaataaatatttaggctgtagatttgttacactccgctatagctttcttcagatctttatagcccacttatttaacaacttgaaaataaggtgttttacctgggttgttacaaaaggattgcattgcgtaaacgctttttatttacaacaaaatggggaagtattacggcgaagataaattggagcgggcgaagggaatcgaaccctcgtatagagcttgggaagctctcgttctaccattgaactacgcccgcttcgagatgcgtaaggcattataaaccttacgctctccttagcaagtgccacgctgctgactgctgattaattcgccatcagcattttggcttgctgccctgaggcggcaagtaacgtagcggatcaattgccgttgcacggtaacgaatctggaaatgcaggcgaacagatgccgcatccgtgctccccatagtggcgattttttgcccagccttcacgctttgcccattatttaccagcatcgtgtcattatgggcgtaagccgtaatgtaatcttcactgtgtttaatcatgatgagattaccgtagccacgcagctggttgcccacatacaccacctttcctgcacccgcggcgtaaataggtgtaccccgtggagcactgatatcaatccctttattgccgccatctgctgtgctatacggcatgataactttccctgtcgttggccataaccaacaacgttgccctactggcggccaggaacttttcggtaccgcactactcggtgtaacgcttgcggttttggtcgtacttttggcggtacttttacgtgtaatactgctacttttcgccccacccagttttagtttctgaccaacttcaatggtgtaagggggggaaatgccgttcagtcgcgccagttcttttacgctggttcccgtggtgcggctaatacgatatagcgtatccccccgtttcacggtgtaaacggagccggaatacgttcctgtatcggaacttttgctaccgctacagcccgccaaaagcagtccaacgcttaacaacatcacgatacccagagattttttattcaggcgtcccgcactcaaaatctttcctcgcttaaaaaacaagacgccttatcatagcagccagcctcttgatacccaatctcttgcttctggaaaaacgtggtaatagagaaagaggttaatttcatttggcaaagggaagtatcatcagcaaaatattcgctgtagaggtatcgaacttcctgactttttaccctatttcccatcctgatgcgtaataatcccaatttatcacattgattttatcgccactcatattgatacgtatcactgcccctattcagagtcctgtttcgtatcatatctgtgtttttttaacgtcatcacacttcctacctcccctaacgcttatcgtcgtttctggcgtaaatcttgcctgcttagactaaatctttgccataagaaccaaatgttcaaatcgaggggatttctatggaagcgcgggaagcaaccgctacgggtgaatcatgcatgcgcgtcgatgccattgctaaggtcaccgggcgggcacgatatactgacgattatgttatggcgggcatgtgttatgcgaaatatgtacgtagccctatcgcacatggttatgccgtaagtattaatgatgaacaagccagaagtttgccgggcgtactggcgatttttacctgggaagatgtgcctgatattccattcgctacagctgggcatgcctggacacttgacgaaaacaagcgcgataccgccgatcgcgcactgctaactcgccatgttcgtcatcatggtgacgccgttgccatcgtcgtggcccgcgatgaactcacggcagaaaaagcggcgcaattggtcagcattgagtggcaagaattacccgttatcaccacgccagaagcggcgctggcagaagacgctgcaccaatccataacggtggcaatttactgaaacaaagcacgatgagcacgggtaatgtccaacaaacaatcgatgccgccgactaccaggtacaggggcactatcagacccccgttattcaacattgtcacatggaaagcgtaacaagcctggcgtggatggaggatgacagccgaattaccatcgtttccagcacccagatcccgcacattgttcgccgcgtggttggtcaggcgctggatattccctggagttgcgtacgagtcatcaaaccatttgtcggtggcggttttggtaataaacaggatgtactggaagagccaatggcggcattcctgaccagcaagcttggcggcattccggtgaaagtttcccttagccgtgaagagtgtttcctcgcaacccgtacccgccacgcttttaccattgacgggcaaatgggcgtgaaccgcgacggaacattgaaaggttatagtctggatgttctgtctaacaccggcgcttatgcatctcacgggcactccatcgcttctgcgggggggaataaagtcgcttacctttatcctcgttgtgcctacgcttacagtagtaagacctgctataccaacctccccagcgctggtgcgatgcgtggttatggcgcgccacaagtcgtatttgccgttgagtctatgcttgatgacgccgcgacagcgttaggtattgatcctgttgaaattcgtttacgcaacgccgcccgcgaaggagatgctaatccgctcacgggcaaacgtatttacagcgcagggttgccggagtgtcttgaaaaaggccggaaaatctttgaatgggaaaaacgccgtgcagaatgccagaaccagcaaggcaatttgcgccgcggcgttggcgtcgcctgttttagctacacctctaacacctggcctgtcggcgtagaaatagcaggcgcgcgccttctgatgaatcaggatggaaccatcaacgtgcaaagcggcgcgacggaaatcggtcagggtgccgacaccgtcttcagccaaatggtggcagaaaccgtgggggttccggtcagcgacgttcgcgttattagtactcaagataccgacgttacgccgttcgatcccggcgcatttgccagtcgccagagctatgttgccgcgcctgcgctgcgcagtgcggcactattattaaaagagaaaatcatcgctcacgccgcagtcatgctacatcagagtgcgatgaatctgaccctgataaaaggccatatcgtgctggttgaacgaccggaagagccgttaatgagcttaaaagatttggcgatggacgctttctaccaccctgaacgcggcgggcagctctctgctgaaagctccatcaaaaccaccactaacccaccggcgtttggctgtacctttgttgatctgacggtcgatattgcgctgtgcaaagtcaccatcaaccgcatcctcaacgttcatgatagtgggcatattcttaatccactgctggcagaaggtcaggtacacggcggaatgggaatgggcattggctgggcgctatttgaagagatgatcatcgatgctaaaagcggcgtggtccgtaaccccaatctgctggattacaaaatgccgaccatgccggatctgccacaactggaaagcgcgttcgtcgaaatcaatgagccgcaatccgcatacggacataagagtctgggtgagccaccaataattcctgttgccgctgctattcgtaacgcggtgaagatggctaccggtgttgcaatcaatacactgccgctgacgccaaaacggttatatgaagagttccatctggcaggattgatttgaggataacatcatgtttgattttgcttcttaccatcgcgcagcaacccttgccgatgccatcaacctgctggctgacaacccgcaggccaaactgctcgccggtggcactgacgtactgattcagctccaccatcacaatgaccgttatcgccatattgttgatattcataatctggcggagctgcggggaattacgctggcggaagatggcagcctacgtatcggctctgcaacgacatttacccagctaatagaagatcctataactcaacgtcatctcccggcgttatgtgctgcggccacgtccattgctggaccgcagatccgtaacgtcgctacctacggtggaaatatttgcaacggtgccaccagcgcagattctgccacgccaacgctaatttatgacgcgaaactggagatccactccccgcgcggtgttcgtttcgtcccgattaatggctttcacaccgggccgggcaaagtgtctcttgagcatgacgaaatcctcgtcgcctttcattttccgccacagccgaaagaacacgcgggcagcgcgcattttaaatatgccatgcgcgacgcaatggatattagtacgattggctgcgccgcacattgccgactggataacggcaatttcagcgaattacgcctggcatttggtgttgccgcgccaacgccgattcgctgccaacatgccgaacagactgcacaaaatgcgccattaaacctgcaaacgctggaagctatcagcgaatctgtcctgcaagatgtcgccccgcgttctagttggcgggccagtaaagagtttcgtctgcatctcatccagacgatgaccaaaaaagtgattagcgaagccgtcgccgcggcggggggaaaattgcaatgaatcacagcgaaacaattaccatcgaatgcaccattaacgggatgccttttcagcttcacgccgcaccaggcacgccgctcagcgaattactccgcgaacaaggactgctaagtgtcaaacaagggtgctgcgtgggtgaatgtggtgcctgtacggtgttggtcgacggcacagcaatagacagttgcttataccttgccgcctgggctgaaggaaaagagatccgcacgctggaaggtgaagcgaaaggcggaaaactttctcatgttcagcaggcttatgcgaaatccggcgcagtgcagtgcgggttttgtacgcctggcctgattatggctaccacggcaatgctggcgaaaccacgcgagaagccattaaccattacggaaattcgtcgcggactggcgggaaatctttgtcgctgcacggggtatcagatgattgtaaatacagttctggattgcgagaaaacgaagtaaaaggatatccggcctgaattcaggccggattcactgaggttatgtgtttaacaactcatatttcttaatcttgcgatagagcgtagcaatgccgatgcccagttcatcagcaacttgcttcttgctgttatgacgactaagcgcctcgcggatcatttgcttttccatctcctccagcgccgtgccgcccgcatcatcgagactcaggtgcgcctcactgacctctgttacatcactttgctccgttgtgccattattcagcagatttggcggcaatagcgtgctgtcgataacttcaccactaggaaccacgttaaccagatattccatcaaattgcttaactcgcgcaggtttccgggccaacgatgcttacgcaatatttcgacgacatcgggagcaatgccaggataaacgcttcccagacgacgggtatgcagatgtaaaaagtaatgcaccaatagttcaatatcttcctgacgttcacgcagcggtggcagagttatcgggataacattaagtcggtagaagagatcttcgcggaatttaccttcggcaatgaactgggccaaattctgattagttgcagaaatgatgcgaatgtcgacttgtattgggctactggcaccaatcggcagaatttcacgtgcctcaatagcgcgcagtaatttagcctgcaacattaatggcatatcacctatttcatcgagaaacagcgtgcccgtattcgccgcctgaatcaaccctgttttaccgttggcagaagcgccagtaaatgcacctttaacataaccgaacagttcgctctccagaagctgctccggaatcgcggcacagttgatagcaataaagggtttattccgtcttccgctcaacttatggattgcacgggcgacgacttctttacccgtgccgctttcaccaaccaccataacgctggatgggctgggtgcaatacggctaatgagtcgttttaattgccgcataacacggcactcgccaaccaattgttcaatatgcggttcatcaggtgcatttgctacagaaaaactggtatggctttggtgaaacgccattaaaaataattgtcggccctgaatgttatgcaattgaccaatgattaattcacttttatcgtcccaactaacaatatgctgcatatgtccatgggtaaaattactctcaaatgttaatggtctgaaacggataggtttcccaataatattattttgcacaacaccaagtgtttttaaggcagtctgattaacaaactgaacccgattttcatcatctacaactaatacgccctgatccatattatcgatcatggtcgcaaatattttactgatgttatctcctggcccctgatcctccagaagtttgctaacaaaaatggtggatatatggcgaacataatcagaaaattcgcgtaaattatcactgatatgctcttgttgctcgtgggtaacggcaatcaaacttatcaccccaacacaacgatcctgtaaaatgacaggcgtacccagaaatgctttttcgcggcaattttctttactatcgcaaccttcgcaaaggggatcgaagcgagactgtgtcacaactttttcagttttcgtttccaggacgtggcggagcaggcgactgttgccgctcaactggcgaccaagaaacttcccatacgcgcccgttccggcaacgcgacacaagttttcatcaacgatctcaacctcaagctgcaaaaacgctggcaagcattctggcaaaacgctgaattgtcggttgaatttgcatcaatacactctgcgtagtagcaagctccatagctttaccttccagacttacttaaaagtcgatcattgaagacgttgatggttcacagatcatgatgatattaactcaggcgaaattggctttgataaaaacataagatttttatcattttctaatgaaattatggaagagatatcacatttctatatcaatatgagaattacggcggtgagtttatcaaactgaagagagatagcctgcccctttatcttatttctgatacttagcagcaaataaataacgcgataaaaaaagccaaacgttttcgtattttacaaacaaccagaagctggcatcaatttgtgatcaaccccacacattatccgtcaaattagtcttttgcagccgcgcggataattctggcacacttattgttagtcccaggtatagctgtgaaaacaccaatcactttggcaagtcacagtgaaataaaccactttgcctgtcattccactaccgggactttatgatgaaaactgttaatgagctgattaaggatatcaatagcctgacctctcaccttcacgagaaagattttttgttaacgtgggaacagacgccagatgaactgaaacaagtactggacgttgccgcagcattaaaagcactgcgtgctgaaaacatcagtaccaaagtctttaatagtggattaggtatttccgtattccgcgacaactccacccgtacccgcttctcttatgcttccgcgcttaacctgctcggccttgcacaacaagatctcgacgaaggcaaaagtcaaatcgctcacggcgaaaccgtgcgtgaaaccgccaatatgatctccttctgcgccgacgctattggtattcgcgacgatatgtatctgggcgcaggcaacgcctatatgcgtgaagttggcgctgcacttgatgacggttacaagcagggtgtactgccacagcgtccggctttagtgaacctgcaatgcgatattgaccacccgactcagagtatggctgacctcgcgtggttacgtgaacactttggtagtctggaaaacctgaaaggtaaaaaaatcgccatgacctgggcctactctccaagctatggcaaaccgctctctgtaccacaaggcatcatcggtctgatgactcgcttcggtatggatgtcaccctggcccatccggaaggctacgacctgatcccggatgtggttgaagtggcgaaaaacaatgctaaagcctccggtggtagcttccgtcaggtcaccagcatggaagaagccttcaaagacgcagacatcgtttatccgaagagttgggcaccttacaaagtgatggaagagcgtactgaattgctgcgtgcgaacgatcacgaaggcttaaaagcactggaaaaacagtgtctggcacagaacgcgcaacacaaagactggcattgtactgaagagatgatggaactgacccgtgatggcgaagccctgtacatgcactgcctgccagctgatatcagcggcgtatcctgtaaagaaggtgaagtgactgaaggcgtattcgaaaaataccgtatcgctacctacaaagaagccagctggaagccttatatcatcgccgcgatgatcctgtcccgtaaatacgccaaaccaggtgcactgctcgagcaactgctgaaagaagcgcaagaacgcgtgaaataacccctcgggccgatcagctggtcggccctctatttccagaggccaaaaggataggatatgtccgttttcagtttgaagattgatatcgccgataacaaatttttcaacggcgaaacaagtccgctctttagccaaagccaggccaaactggcgcgccagttccaccagaaaatagctggttatcgcccaacaccgctttgtgcgctggacgatctcgcaaacctttttggtgtgaagaaaattctcgtcaaagacgaaagtaaacgattcggtctgaacgccttcaaaatgcttggcggtgcgtacgccatcgctcaattattgtgtgaaaaatatcatcttgatatcgaaacgctgagttttgagcacctgaaaaatgccatcggcgaaaaaatgactttcgcgaccaccaccgacggcaaccacgggcgcggtgtggcgtgggcagcacagcaactcggacagaatgcggtgatttacatgccgaaaggttctgctcaggaacgcgttgacgccattctgaacctcggtgccgagtgcatcgtcacggatatgaactatgacgataccgttcgcctgaccatgcaacacgcgcagcagcacggctgggaagtggtacaggacacggcatgggaaggttacaccaaaatcccaacctggatcatgcaaggctacgcaaccctggcagatgaagccgtcgagcaaatgcgtgaaatgggcgtaaccccgacgcacgttctgctgcaagccggtgtcggagcaatggccggtggtgtgctgggttatctggtcgacgtctatagcccgcaaaatctgcacagcattattgttgaacctgacaaagctgactgtatttatcgctccggcgtcaaaggcgacatcgtcaacgttggcggtgatatggccaccatcatggcaggcctggcctgtggcgaacctaacccgctgggctgggaaatcctacgtaactgcgccacccaattcatctcctgccaggacagcgttgccgcattaggtatgcgcgtgctgggtaatccgtacggcaacgacccgcgcatcatctccggtgaatccggcgctgtcggtttgggcgttctcgcagcggttcattatcacccgcaacgtcaaagcctgatggaaaaactggcgctgaacaaagatgccgtggtgctggttatcagcactgaaggcgacaccgacgtgaagcactaccgcgaagttgtctgggaaggcaaacacgctgtagcaccttaatcaccctattggaactgctccctgcaaaacggggagtaaaaaatctggagaaaaataatggctaagaatattccattcaaactgattcttgaaaaagcaaaagattaccaggcggatatgactcgcttcctgcgcgacatggttgctattcccagtgaaagctgcgacgagaaacgcgtagtacatcgtattaaagaagagatggaaaaagtcggcttcgataaagttgaaatcgacccgatgggcaacgttctcggttatatcggccacggcccgcgtctggtggcaatggacgctcatatcgataccgtcggcattggcaacatcaaaaactgggacttcgatccgtacgaaggcatggaaactgatgaactgattggtggtcgcggtacttccgaccaggaaggtggcatggcctctatggtttatgccggtaaaatcattaaagacctcggtctggaagatgaatataccctgctggttaccggtacggtgcaggaagaagactgcgacggtctgtgctggcagtacattattgaacaatccggcattcgcccggaatttgtggtcagtaccgaaccaaccgactgccaggtataccgtggtcagcgcggtcgtatggaaattcgtattgatgttcagggtgttagctgccacggttctgcaccagaacgcggtgataacgccattttcaaaatgggtccgattcttggcgaattacaagaactctcccaacgtctgggttatgacgaattcctcggcaaaggcaccctcaccgtttctgaaatcttcttcacatccccaagccgttgcgctgtagcagacagctgcgcagttagtatcgaccgtcgtctgacctggggcgaaacctgggaaggcgcgctggacgaaatccgcgccctgcctgcagtacagaaagctaacgcggttgtttctatgtacaactacgaccgtccgtcctggactggcctggtttacccaaccgaatgctacttcccgacctggaaagtggaagaagatcacttcaccgttaaagcactggtgaatgcctacgaagggctgtttggcaaagcgccggttgttgataagtggaccttcagtactaacggcgtatctatcatgggccgtcacggcattccggtgatcggctttggcccgggtaaagaacctgaagcgcatgcacctaacgaaaaaacctggaaatctcacctggtgacctgtgccgcgatgtacgctgcaatcccgttaagctggctggcaacagagtaattactcttcacttattcccctccggttcgccggagggtttttggagtttgctatgcgcgtattgatcaaaaacggcactgtcgttaacgcagatggacaagccaaacaggatttgctgattgaaagcgggattgttcgccagttgggcaacaatattagcccgcagctcccgtatgaagaaattgatgccactggctgttacgttttccctggcggcgtggatgtccatacgcatttcaatattgatgtcggcatcgcgcgcagttgtgatgatttttttaccggtacccgcgcagctgcgtgtggcggtacaacaaccattattgaccatatgggatttggcccaaacggctgtcggttacgccatcaactggaggtttatcgtggttatgccgcccataaagcggtcatcgattacagctttcacggtgtgatccagcacattaatcacgcaatcctcgacgaaatcccgatgatagtcgaggaaggactgagcagttttaaactctatttaacctatcaatacaaactcaacgatgacgaggttttgcaggcattacgccgcttgcatgaatccggcgcgctgaccaccgtgcacccggaaaatgatgcggctatcgccagcaagcgggcggaatttatcgccgcagggttaaccgcgccgcgctatcatgccttgagtcgccctctggaatgcgaagcggaagccatcgcccgcatgattaacctggcacaaattgccggtaacgccccgctctatatcgtgcacctgtctaacggcttaggtctggattatctgcgtcttgcccgtgcgaatcaccagccagtctgggttgaaacctgcccacaatatctcctgttggacgaacgcagttacgatacagaagatggcatgaagttcattcttagcccaccgctgcgtaacgtacgcgagcaggacaaactgtggtgtggcatcagcgatggtgcgattgacgtggtggcaaccgatcactgcaccttcagcatggctcaacgcctgcaaatttctaaaggcgatttcagtcgctgcccaaatggcttacccggtgtggaaaaccgcatgcagttactgttttccagtggcgtgatgacgggacgtataacaccggaacgctttgttgaattaaccagcgcaatgcccgccaggttgtttggcctgtggccgcaaaaaggattattagcgcccggttccgacggcgacgtggtgattatcgacccacgtcagagccaacaaattcagcatcgccatctccacgacaacgccgactacagcccatgggagggttttacctgtcagggcgcgattgtcagaaccttatcccgtggtgaaacgattttctgtgacggcacctttacaggcaaagccgggcgaggtcgtttcctgcgacgcaaaccgtttgtccctcccgtgctctaaccactgccagggatctatacacaatcaagaatgatgagtgaggaaaaatgagtaagaaaattgttctcgccctgggcgggaatgcgctgggcgatgacctggccgggcaaatgaaagcggtaaaaattacttctcaggcaattgttgatttaattgcccagggacatgaagttatcgtcactcatggtaacgggccgcaggtgggcatgattaaccaggcctttgaagctgccgcaaaaactgaagcgcacagcccaatgctgccgatgtctgtctgtgttgcattaagccagggttatattggttacgatctacaaaacgctttaagagaagaactgctttctcggggcattaataaacctgtagcaacgctggttactcaggtcgaagtcgacgctaacgatccggcattcctcaacccgaccaagccgatcggtagcttctttaccgagcaagaagcagagcaactgacaaaacagggttacactctgaaagaagatgctggtcgcggctatcgccgtgttgttgccagcccaaaaccggttgatatcattgaaaaagaaacggttaaagctctggtagatgcaggtcaggtggtgatcaccgttggcggtggtggtatccctgttattcgtgaaggtaaccatctgcgtggtgccagcgcggttatcgataaagactgggccagcgcccgtttagcagaaatgattgatgccgatatgctgatcattctgactgcggtagaaaaagtggccattaacttcggtaaagagaatgaacagtggctcgatcgcctgagtttaagtgatgctgaacgctttatcgaagaaggtcattttgcgaaaggttctatgctgcctaaagtggaagctgccgccagctttgctcgctctcgcgcaggtcgtgaagcactgattaccgtattgagcaaagcgaaagaagggattgaaggcaaaacaggaacggtgatttgtcagtaatttaaaggccgggtgggtaataccatccggccaaagattgtcaagtaagtgcgctttgttgatgccggatgcggcgcgagcgccttatccgtcctacaaaacatcgcaaattcaatagattgcaatgcacttgtaggcctgataagcgtagcgcatcaggcaatttggcgtttgtcatcagtctcaggccgggtgggtaataccatccggccattttcatttaagccacttccagcacttcttttgtcgctttcacgccctgatgcatcaacatcattaacgcctcaagtacgccgccgccaatcgcccgggctttatcagaaacgctggtgaaatcagcggtttcaccacgaggatcgatatcaccaattttaaaaccaccaaccactgccaggccgtcgttcaacaagccacgcaccatccccgtcaacggtgctttaatttcatgctcaccaatccaggcaatcacatcgccctctttcaccagatcgcctaatttcacgttggatcgcataatgcctgcagcaggagcacggatcacccgtcgggtggtatgccccataatattgccaggaacaccggtattctcctgcgcacaaccagagtaaatcacctgaccgagccagtgcccgcgatttgtttcaattaccgcatgacaatccttcccagcagtaaagcccggcccaagcgcgattgttactggtgccatatctgcccgcgttcccaaattctgtttcgccagaatagcgtccaccacgcaaagcggtttcagttcatcaagcaaactacaggcgggatctaccatcacaggaatgaatccgcgttcggtaagtttcatcgcttccgcagagctggttgccaggcgagcagtgacgccttcgaccgtcatttcgccatcgaacacggcctgggcaaacgccacggtacaacgaatcactgtcggtttttccacttccagcatgatcactttaaaacccgcatgatacagacgtagcgccacaccactggcgatatctcccgcaccgcgaatcaccaccagctggtgtccggaaggatgagaaggtttcatcatcagcccacccggcgcgttatttttcacctgtaatatttctgccagcacgctgatggcgatctcctgcggcgtttccgcacctatgttgtaaccaacgggcgcatgtaaacgggcaatatgttcttcagccacgcctttctcacgcaattgacgcaggaaaagctgaaccttgcgacgacttgccagcaaccccaaccatgcaatgggctgttcaatgagtttgtcgagggcttcacgatcctgattattcgtggcaatcaggacaaaattatcagggcgaatatccagtgcttccactgccgcaccaaagctctcagcatggagaagcgtggtacttggtgggaatagttcaggattgaggctttcgcgataaatatcagcaacggcaatatcaaatcctaatagcgccgcactctgggctatcgcccggttgacatgccccgcgccaatcaacaccagacgtggacgcataccatggacgctgataaatacactcattgcacctccacaatcactcccgacagcatccgcaccgttacgagccatacgtccatggaataatcgcggcttacgttcctgcaatgcctgaaggctctcttcaatcaccttccgctcaaccattccgccaccaattgtaccgacgatagaaccatcggcgcgcactaacatttgtgcagaatggcggggagtgctgcctcggctatcaacaatttgcgccatagcaaacggacaattttgctcttcgagttttgcagcctctgtgaaaatattcataccaacctcaatggatatcctttcagtaacccggaatacccgggccgttaattcacaaatctgcgcgcgattgcaggatgttcttgtatatcgcccagccagattgcctctacgtcgtgttgttgcagcggttgaaggagctcgctttgtgcaatcgcattctcacattgagaaaaacggttaatgaaccagactcgccgacaaccttgcggtacgtttttaaacgccccctgagggtggcgaaccagcgcaacgagatcgctcagttgcaaggttgcatcaggtgttaacccggtaatatcagcaaactggctccagcgatggacattttctgtgctcactttcgcgcccaaagtatgtcctcccatcacagcaatcacgcagcaactgcttttgggtatgcaaggttcgtgctcatcaggcgcttttaacggcattccacggctgccatctgcttcaatgagaattacgtcacactctggtcgttgcaccagtgcatcaatcgcttctggcgtaaatccctgcacttttccctggttcgctttccagctgtgaaaacaaaaactaatgggggatgtaagagacgcatgaggaagcatggcgggatcacgacagaaaaccacgggccagtgagacgttggcataaacatatgtgtcgtcgtcgtgattaacacacgcctgccgctagcctggagcagttctgccagccaaaaaagcaagctggttttccccccagcaccaacaacagaaatcacagtgggacgtttctgcgcacctaaatcaatgactaatgcgcttgggtcaactatacttttcacgagtctttatgacctctctgggataaattatccccaacttaatccatcaggaagtaacgcaattatcaggcgttattagcccctataaataatggaaccactatgagtgccatcgactgtataattaccgctgccggattaagtagtagaatggggcaatggaaaatgatgttaccctgggaacagggaacaattcttgatacaagtatcaaaaatgcgttgcagttttgtagccgaattattttagtcaccggctatcgtggtaatgaactgcacgaacgttatgcgaaccagagcaatatcactattattcacaacccagattatgcgcagggtttactaacatccgtcaaggccgcagtacccgcagtgcaaacagaacattgttttctcacccacggtgacatgccaaccctcaccatcgatatttttagaaaaatctggagcttacgaaatgatggcgcaatactgccactccataatggcatccccggccatccgattttagtgagtaaaccatgcctgatgcaggcaatccaacgacccaatgtcaccaatatgcgtcaggcactccttatgggagatcattattccgtcgaaatagaaaatgcagaaataattttagatattgatactccggacgactttattacagcgaaggaaaggtatactgaaatttaaaaaacgtagttaaacgattgcgttcaaatatttaatccttccggcactcattatcataatgataaggaatcactgattttgagaaaagagaaaaattgataaatgggctggcaataataattttcaggagtgattttaattctcatttagcacctgtgagttcattcacaaaaagcccttaagtttcgagccgcctcacatttttttatatttcccgccaaacctggcaagagtggtgcgattgttgctctatccccctaaaccaccggatttctcaacaccggtcactcaatgatatctgtataagctaaggagagggttatgggggatattatgcgtcccattccgtttgaggaacttttgacgcgcatatttgatgaataccaacaacaacgcagtatctttggtattcccgagcaacagttttacagtcctgtaaaaggtaaaactgttagcgtcttcggtgaaacctgtgccactcccgtcggccctgccgctggcccgcacacgcagctcgcgcaaaatattgtcacttcctggctgactggcggacgcttcatcgaactaaaaaccgtccaaattcttgaccgcctggagctggaaaagccctgtatcgatgccgaagacgagtgctttaacaccgaatggtctaccgagtttaccctgcttaaagcctgggatgaatacctcaaagcctggtttgccctgcaccttctcgaagcgatgttccagccttctgattccggtaaaagcttcatctttaatatgagcgtcggttacaacctcgaaggtattaagcaaccgccgatgcaacagttcatcgacaatatgatggacgcatctgaccatccgaaattcgctcaatatcgcgatacgctgaataaattactccaggatgacgcatttttagctcgccacggattgcaggaaaaacgcgaaagcttgcaagccttacccgctcgcatccccaccagtatggtgcatggcgtcaccctctccaccatgcacggctgtcctccgcatgaaatcgaagccatttgccgctacatgctggaagaaaaagggctcaacacctttgtgaaacttaacccgaccttactggggtacgcgcgtgttcgtgagatcctcgatgtctgcggtttcggttacataggcttaaaagaagagagttttgatcacgacctcaagctgacgcaagcactggaaatgctggaacgcctgatggcactggcaaaagaaaaaagtctcggctttggcgtaaaactgactaacactctcggcaccatcaacaataaaggcgcactgcctggtgaagagatgtatatgagtggccgtgcgctgttcccgctctccatcaatgttgcagcagttctctctcgcgcctttgacggcaaactgcccatttcttattccggtggtgccagtcagctgactatccgcgatatttttgatacaggtattcgccctattactatggcaaccgacctgctgaaacctggcggctatctgcgcttaagtgcctgcatgcgcgagctggaaggctccgacgcctggggacttgaccatgttgacgtcgaacgactgaacagactggcagcagatgcgttaaccatggaatacacccagaaacactggaagccagaagagcgtattgaagtggcagaagacctgccgctgaccgactgctacgttgccccctgtgttactgcctgcgctatcaagcaagatattccggaatacatccgtctgcttggcgaacaccgctatgccgacgcgctggaactcatctaccaacgcaacgctctgcccgccattaccggtcatatttgcgatcaccagtgccaatacaactgtacccgcctggattacgacagtgcgctgaatatccgcgaactgaaaaaagtcgcgctggaaaaaggttgggatgaatataagcaacgctggcacaaaccagccggttctggtagtcgccatccggttgccgtgattggtgcaggtccggcgggtctggcagcaggttacttccttgccagagcgggccatccggttacgctgtttgaacgcgaagccaatgcgggcggcgtggtgaaaaatatcattcctcagttccgtattcctgcagagttaattcagcacgatatcgattttgttgccgctcacggcgtgaaatttgagtatggctgcagtcccgatttaaccattgagcagttaaaaaatcagggcttccactatgttctgattgccaccggcactgataaaaatagcggtgtgaaactggcgggcgacaaccaaaatgtctggaaaagtctccccttcctgcgtgaatacaacaagggtacagcgctcaagctgggcaaacatgtggtcgttgtcggggcgggtaacaccgcaatggactgcgctcgtgcggcgttacgcgttccaggcgtagaaaaagcaacgatcgtttaccgtcgtagtctacaagagatgcccgcatggcgcgaagagtatgaagaagcgttgcacgacggcgtagagttccgtttcctgaataatccggaacgtttcgatgctgatggcaccttaaccttgcgcgttatgagccttggcgaaccggatgagaaaggtcgtcgtcgtccggttgaaaccaatgaaacagtaacactgcttgtagacagcctgatcaccgccattggtgaacagcaggatactgaagccctgaatgcgatgggcgtgccgctggacaaaaacggctggccagacgtcgaccataatggcgaaactcgtctgactgacgtctttatgatcggcgacgtacagcgcggaccatcctccattgtcgctgctgtcggaaccgcgcgtcgggcgaccgatgccatccttagtcgggaaaatatccgttcccaccagaacgataaatactggaacaacgtcaatccagcggaaatctatcaacgtaaaggcgatatctctatcacgctggtgaacagtgacgatcgtgacgcgtttgtcgcccaggaagccgctcgctgcctcgaatgtaactacgtttgcagcaagtgtgtggatgtctgcccgaaccgcgccaacgtctccattgcggtcccaggcttccagaaccgtttccagacgctgcacctcgacgcttactgtaacgaatgcggcaactgcgctcagttctgtccgtggaacggtaaaccgtacaaagacaaaatcaccgtcttcagcctggcgcaagactttgataacagcagcaacccaggcttccttgtggaagattgccgggtacgagtacgtctgaataaccaaagctgggtgttaaacatcgacagcaaaggtcagtttaacaacgtaccaccggagctgaacgatatgtgccgcatcatcagccatgtccaccagcatcatcattatctgctgggccgcgtggaggtgtaatcatgttgattctgaagaatgtcactgcggtacagctacacccggcaaaagtgcaggaaggcgttgatatcgccatcgaaaacgatgtgattgtcgctatcggcgatgccctgacgcaacgctaccccgacgccagcttcaaagagatgcatggccggattgtgatgccagggattgtctgcagccacaaccatttttacagcgggctttcccgcggaattatggcaaacatcgcccctttgcccggatttcatcagtacgctgaaaaatctctggtggcggctcgatcgcgcccttgatgaagagagcctctattacagcggactgatttgttccctggaagcgattaagagcggatgtacaagcgttatcgatcaccatgcctctccggcgtatatcggcgggagactctccacattgcgcgacgcatttttaaaagttggcctgcgcgcgatgacctgttttgaaactactgaccgtaacaacggcatcaaagagttgcaggaaggtgtagaagaaaacatccgtttcgcccgtttgattgatgaggcgaagaaagcgacaagcgagccgtatctggtggaagcacatatcggtgctcacgcgccgtttaccgtgccggatgccggtctggagatgctgcgtgaagccgtgaaagccacaggccgtggtttgcatattcacgctgcggaagacctttacgacgtttcctacagtcaccactggtacggcaaagacctgctggcacgactggcgcaattcgatctcatcgacagcaaaacgctggtcgctcatgggctgtacttgagcaaagatgacatcaccctactcaatcagcgcgatgcgttcctggtgcataacgcccgtagtaacatgaacaaccatgtcggctacaaccatcaccttagcgacatccgcaatctggcgttgggaacggacggcattggtagcgacatgtttgaagagatgaaatttgccttctttaaacatcgcgatgcgggtggtccgctgtggcctgacagttttgccaaagccctgactaacggtaacgaactgatgagccgcaactttggcgcgaaatttgggcttctggaagccggttacaaagctgatttaaccatttgcgattacaacagcccgacgccgctgctggcagacaatatcgccgggcatatcgctttcggtatgggcagtggcagcgttcacagcgtgatggtcaatggtgtgatggtctatgaagaccgtcagtttaacttcgattgcgattccatttatgcacaagccagaaaagccgctgccagtatgtggcgtcggatggatgcgctggcataaatgacagatgccctcttcccgcagggaagagggttaaataaggaaagaagatgattgaacaatttttcaggcccgactctgtcgaacaggcgctggaactgaagcgccgctaccaggatgaagccgtctggttcgccgggggcagcaaactcaatgctacaccaacccgtaccgataaaaagattgccatttccttacaggatctggaactggactgggttgactgggataacggtgcactgcggattggcgcaatgtctcgcttgcagccactgcgtgatgcgcgatttattcctgcagcgctgcgtgaagccctcggttttgtttacagtcgccatgttcgtaatcagagcaccattggtggtgaaatcgccgcccgccaggaagagagcgtgctgcttcccgtcctgttggcactggatgctgaactggtttttggcaacggcgaaacgctgagtatcgaggactacctggcctgcccatgcgatcgcctgctaaccgaaattatcattaaagatccgtatcgcacctgtgcgacccgcaaaattagccgttctcaggcaggtttaaccgtcgtgacggcagccgttgcaatgacagaccacgacggtatgcgaattgcgctggatggcgtcgccagtaaagcactgcgtctgcatgatgtcgaaaaacaaaatctggaaggcaatgcacttgaacaggctgtcgccaacgccattttcccgcaggaagatttgcggggcagcgtggcctataaacgctatatcacgggagttctggtagccgacctgtatgccgactgccaacaggctggggaggaagccgtatgatcatccactttactttaaatggcgcgcctcaggagctaaccgttaatccaggcgaaaacgtgcaaaagctgttgtttaacatgggaatgcactctgtacgcaacagtgatgatggtttcgggtttgccggttctgacgcaataatctttaacggtaatatcgttaacgcgtccttgcttattgccgcacagttagagaaggcagatattcgtaccgcagaatctctgggcaaatggaacgagttaagtctggttcaacaggcaatggttgatgttggcgtggtgcagtctggttataacgatccagctgcagctctgattatcaccgatcttctcgatcgcatcgccgcacctacccgcgaagagatcgacgacgcgctttctggtttgttcagccgcgatgctggctggcagcaatactatcaggtcattgaactggcggttgcacgtaaaaataatccgcaggccaccattgatatcgctccgactttccgtgacgacctagaagtcattggtaagcattatcctaaaactgatgccgcgaaaatggtgcaggcgaaaccctgctatgttgaagaccgcgtaacggctgacgcctgcgtcattaaaatgttacgtagcccacacgctcacgcactgattactcatctggatgtcagcaaagctgaagccttaccgggcgtcgttcacgttattactcacctgaattgcccggatatctactataccccgggtggtcagagcgcaccggaaccgagtccgcttgaccgccgtatgttcggcaagaaaatgcgtcacgtcggcgatcgtgttgctgcggtcgtcgcagaaagtgaagaaattgcgctcgaagcactgaagctcatcgacgttgaatatgaagtgcttaagccggtaatgagcatcgacgaagcaatggcggaagatgcgcctgtcgtgcacgatgaaccggtggtgtatgttgctggtgcgccagatactctggaagacgataacagccatgcagcccagcgcggcgagcatatgatcatcaacttcccgatcggttctcgccctcgcaaaaatatcgccgccagtattcatggtcatattggcgatatggacaaaggctttgccgatgccgatgtgatcattgagcgaacctataacagtacgcaagcgcagcagtgcccgactgaaacacatatctgctttactcgtatggacggcgatcgtctggttatccacgcctccacccaggtaccatggcacttacgccgccaggtcgcgcgcctcgtgggcatgaaacagcataaagttcatgtcattaaagagcgagttggcggcggttttggttccaaacaggacatcctgctggaagaagtgtgcgcctgggcaacctgcgtgaccgggcgtccggtactgttccgctacacccgtgaagaagagtttattgctaacacctctcgtcacgtcgcgaaagtcaccgtcaaactgggagcgaaaaaagatggtcgcctgacggcagtgaagatggatttccgcgccaacactggcccttacggcaaccacagtctcaccgtaccgtgtaacggaccggcgctgagcctgccgttatatccgtgcgataacgtcgatttccaggtcaccacctactacagcaacatttgcccaaatggtgcttatcagggttatggcgcaccgaaaggtaacttcgctatcaccatggcattagcggaactggctgaacagttacagatcgaccaactggaaattatcgaacgtaaccgggtacacgaagggcaagagctgaaaattctcggtgcaatcggtgaaggtaaagcgccgacctccgttccttccgccgccagctgtgcactggaagagatcctgcgtcagggtcgcgagatgatccaatggagcagtccgaaaccgcaaaatggtgactggcacatcggtcgcggcgtcgccattatcatgcagaaaagcggtatcccggatatcgatcaggctaactgcatgatcaaactggaaagcgacggcacctttatcgttcattctggcggtgcggatattggtactggtctggatactgtagtgacgaaactggcagcagaagtgctgcactgcccaccgcaggacgtgcatgttatctccggtgataccgatcatgcgttgtttgataaaggcgcatatgccagctccggtacttgcttcagcggtaacgcggcgcgtttggcagcggaaaatctacgggagaaaattctgttccacggcgcgcaaatgttgggtgagccagtggcagatgttcaactggcaacgccgggcgtcgtgcgcggcaagaaaggcgaagttagtttcggggatattgcccataaaggcgaaaccggcaccggctttggtagtctggtgggaactggcagttatatcacgcctgatttcgccttcccgtatggcgcaaacttcgctgaagttgccgtcaacacgcgtacgggtgaaatccgcctggataaattctacgccttgctggactgcggtacaccggtcaatccagagttagcgttgggacaaatctacggtgccaccctgcgtgctatcggccacagtatgagcgaagagatcatttatgacgccgaaggtcacccgttaacgcgtgatttacgcagttacggcgcaccgaaaattggtgacattccgcgtgatttccgcgctgtgctggtgccgagcgacgataaagtcggcccgttcggggcgaaaagcatcagcgaaatcggtgtaaatggcgcagctccggcgattgctaccgcaattcacgatgcatgcggcatctggttacgcgaatggcatttcacaccggagaaaatactcactgcgctggaaaaaatataaataataaatggccgcttcggcggcctgtttctctgtttgaacgatgactaaatagtgactgcgaaaatgagataagccgttctcaaggcgtcctgcgccccaaattcgtgggaatttattttactaattcagatgatcaaatttactttaaaaggagtgaagggatgtctgatataaaccatgcaggttctgaccttatatttgaactggaggatcgccctccctttcatcaggctctcgttggtgccattacccatctgttggcaattttcgttccgatggtaacccccgcgttaatcgtgggtgcggccttacagctttccgctgaaacaactgcctatcttgtttctatggcgatgatcgcctctggtattggtacctggttacaagtaaaccgctacggcatcgtcggttctggcctactcagtattcagagtgtcaattttagttttgttacggtcatgattgcgctgggcagcagcatgaaaagcgacggttttcacgaagagttaatcatgagcagccttctcggcgtctccttcgttggcgcatttctggttgtcggatctagttttatcttgccctatttacgtcgggttattacgcctaccgtcagcggtattgtggtactgatgatcggcttaagcctgattaaagtcggcattatcgattttggtggaggatttgcagccaaaagcagcggtacgttcggcaattacgaacatctcggcgttggtttattggttttaattgtggtgatcggctttaactgctgtcgcagtccgttgctacgcatgggagggatcgccattgggctatgtgtcggctatatcgcaagcttatgcctgggcatggtggatttcagcagtatgcgcaatttgccgttaatcaccatcccgcatccgttcaaatacggctttagttttagcttccatcagttcctggtggttggcacgatttatctgcttagcgtgctggaagcagtcggcgatatcaccgccacggcaatggtttcccgccgccccattcagggggaagagtatcagtcccggctgaaaggcggcgtgctggcagatggtctggtttctgttatcgcctccgctgtcggtagtttaccattaaccacgtttgcgcaaaataatggggttattcagatgactggcgtcgctagtcgttatgtcgggcgaaccatcgcggtaatgctggttatcctcggcttatttccgatgattggcggcttcttcacgaccattcccagcgcagttctgggaggcgcaatgacgttgatgttttccatgattgccatcgcagggattcgcatcatcatcaccaacggtttaaagcgccgtgaaacacttattgtcgccacttctttaggtttagggcttggcgtctcctacgatcccgaaatttttaaaatattgccagcctctatttatgtattagttgaaaaccctatttgtgctggcgggttaactgcgattttattaaatattatcctccctggtggctaccgacaggaaaacgttctgcctggtattaccagtgcggaagagatggattaacagtaaaggagtcaatgatgagtggagaacacacgttaaaagcggtacgaggcagttttattgatgtcacccgtacgatcgataacccggaagagattgcctctgcgctgcggtttattgaggatggtttattactcattaaacagggaaaagtggaatggtttggcgaatgggaaaacggaaagcatcaaattcctgacaccattcgcgtgcgcgactatcgcggcaaactgatagtaccgggctttgtcgatacacatatccattatccgcaaagtgaaatggtgggggcctatggtgagcaattgctggagtggttgaataaacacaccttccctactgaacgtcgttatgaggatttagagtacgcccgcgaaatgagcgcgttcttcatcaagcagcttttacgtaacggaaccaccacggcgctggtgtttggcactgttcatccgcaatctgttgatgcgctgtttgaagccgccagtcatatcaatatgcgtatgattgccggtaaggtgatgatggaccgcaacgcaccggattatctgctcgacactgccgaaagcagctatcaccaaagcaaagaactgatcgaacgctggcacaaaaatggtcgtctgctatatgcgattacgccacgcttcgccccgaccagttctcctgaacagatggcgatggcgcaacgcctgaaagaagaatatccggatacgtgggtacatacccatctctgtgaaaacaaagatgaaattgcctgggtgaaaagcctttatcctgaccatgatggttatctggatgtttaccatcagtacggcctgaccggtaaaaactgtgtctttgctcactgcgtccatctcgaagaaaaagagtgggatcgtctcagcgaaaccaaatccagcattgctttctgtccgacctccaacctttacctcggcagcggcttattcaacttgaaaaaagcatggcagaagaaagttaaagtgggcatgggaacggatatcggtgccggaaccactttcaacatgctgcaaacgctgaacgaagcctacaaagtattgcaattacaaggctatcgcctcagcgcatatgaagcgttttacctggccacgctcggcggagcgaaatctctgggccttgacgatttgattggcaactttttacctggcaaagaggctgatttcgtggtgatggaacccaccgccactccgctacagcagctgcgctatgacaactctgtttctttagtcgacaaattgttcgtgatgatgacgttgggcgatgaccgtagcatctaccgcacctacgttgatggtcgtctggtgtacgaacgcaactaataataaaactttaacatcctcgtgaggacatcattatgtctggagacatcctacaaacaccggacgcaccaaagccacagggcgcgctggataattattttaaaattaccgctcgtggcagtaccgttcgtcaggaagtactggctggcttaacgacctttctggccatggtttattccgttatcgtcgttccgggaatgctgggcaaagcaggttttcctcccgcagctgtgtttgttgccacctgtctggtcgcgggcttcggcagcttgctgatgggattatgggctaatttgccaatggcgattggttgcgcgatttccttgacggcgtttaccgcattcagtctggtactcgggcaacaaattagcgttcctgtcgcactgggcgcggtatttctgatgggcgtcatcttcaccgccatttccgtaaccggtgtgcgtacctggatcttacgtaatttgccgatgggtatcgctcacggtacaggtatcggtatcgggctgtttctgctgctgattgctgctaacggtgtgggtatggttatcaaaaacccgattgaaggcttgccagtggcgctcggtgcgtttacctccttcccggtgatgatgagcttgctggggctggcggtcatcttcggcctggagaagtgtcgcgtacccggcgggatcttgttggtgattattgcaattagcatcatcggcttaatctttgacccagcggtgaaataccacggtctggtggcgatgccaagcctgactggcgaagatggtaagtctctgattttcagcctcgatattatgggtgcactccagccaactgtacttccgagtgtactggcattggtgatgaccgcagtgttcgacgctactggcaccatccgtgccgtcgccggtcaggcgaatttgttggataaagacaaccagatcatcaacggcggcaaagccctgaccagtgacagtgtaagtagtatattctccggcctggtgggcgcagcgcccgcagcggtttatatcgaaagtgcggcaggaaccgccgccgggggtaaaacaggtttaaccgcaaccgtagtgggggcgttattcctgttaattctgtttttaagtccgctgagttttttgatccctggttacgccactgcacccgctctgatgtacgtaggtttgctgatgttaagtaacgtcagcaagctggatttcaatgattttattgacgctatggctggcctggtgtgtgccgtgttcatcgttctgacttgtaatatcgttaccggtattatgctgggctttgtgacactggtcgtaggccgcgtctttgcacgcgaatggcaaaagctgaatattggtacggtgatcattactgccgcactggtcgcattttacgcgggtggttgggcaatctaatagattctccgcgcctttcagcgcggagatttctttcagagaggattctcaccgctggcaacaatacgctgctggcggactcgcctgagttctctttcagtaagcaactgcagcgcctgtgttgggcaagattcaacgcaggctggcccctcttcccgctgttcacagagatcgcatttcacaatttgttgtcgggtatcccccggcaagctctgaatggtgatcattccaaacgggcacgcactgacgcaactctgacagccaatacaacgggcagaattggtctgcaccacctgctcgcccatcgtcagcgcccccacggggcaagcgccaacacaaggggcgttttcacactgatggcacatcaccggcgcactgatgctgtccagtcgctgtaccttcagccggggtaaaaagacatcggcattcaactcctgttcactagggtgagcgaccacacaggctacttcacaagtacggcagccaatacagtcagccggattaacgataattaagcttttcatcagcttgccttcgtatcaaacagagttaacatatcgcgcgccgcctgccttcctgcggccattgcagtgacaaccagatccgcgccatgaactgcatcaccaccagcaaagacttttttcagatgcgtctgggtaggtaaatacccgacgtcaccggtttgaatcaggccccatttatcgagtttaattccgctgccctgcaaccacggcatggcatgcgcctggaaaccaaaggccataatcagaacatcggcgggcaattcaaactcactacccgctaccggacgaggacgacggcgaccatccggccccggctcacccatggcggtacgaatcaggcccaccgcagttaaacgcccatcttcgtcacaagcgatatattgcggttgaacattgaactgaaactcgacaccttcctcgcgcgcattaaccacctctttgcggctgcccggcatactgacttcatcacgacgatacgcgcaggtcacgctggcggcattgaggcggatggaagtccgcaaacaatccattgtcgtatcgccaccgcccaataccacgactcgcttaccttccacgtccgtcagcggatactcttcagactccggcaatcccatgagctggcgggtatgggcagtcaggaacggtagagcctgaatgacaccgggcgcatcttcatgcggcagatctgctcgcatcatcccgtaagtccccacgccgatgaaaactgcatcatattcagaagttaaatcgctaaaggtaatatcgcggccaatttcacagttaagatgaaagtcgattcccattgcggtgaatatctctcgccgctggcttaataccgttttatcgagtttgaaaggaggaatgccaaaagtcagcataccgccaatttctggatggcgatcaaagacatcgacctgaactcctgcgcgcgccagaatatcagcacaccctaaccctgcaggcccagcgccaatcaccgccactttttcgctacggggaacaactttgctgacatcgggacgccaacccatcgccagcgcggtatcggtgatgtagcgttccagattaccgatagagactgcgccgctgtgatctttcaaagtacatgcgccttcacaaagacggtcctgtggacataccctgccgcaaatttctggtaaggaactggtctggtggcaaagttctgccgcttcaataatctttccttcctgtaccagacggatgtaatccggaatagcgttatgcagcgggcaatgccagttgcagttagctttttcggcacaataaacacagcggtcactctcataagtcgcttgttgtggatccagcccgcaatatatttcgccaaagtgggttttccgttcactcgcactaattttatctgcgcctttacggctgttaacggggagcaacgctgcactgcgagatggctgagcgtcactactcgcttttcctgctgccgttttgcgctggcgggccacctttatctgctgcaaccctttatcgtccatcagtcgtaacgcctgtgttgggcaaacttcaatacaggcttgcgtgccggaactgcgctggttacaaaggtcgcatttctgcgcaatcgtatcgaccatctcaacgacgccaaaggggcaagcgattgcgcatcttttacaaccaatacatttttgctcgtccagttgtacgctatcggactggaaagtcagagcattaaccggacaagccgtaacgcaaggggcattgttgcagtgatggcaggccaccggattcgcagcctggcctttccctacaacgtggatacgcggtcgaaagtcactgtgactcagcggccagttttcttgattgtgtgccaccgcacaggcaatttcacaagcatgacagcctatacattccgcagcttcagcagcaataaacttattcatttgcatccctttcatttaatgagttatgtcttctcaaatttcgcgatgcaataaacgggcatatattaggtagcatgaccgttttaattataattttgcgactgagttcaaattattgcccctcaatctatgccgctttcattatttcaacattgccgatcaaaagagcgctatccagataaaaacgattaaatgcgagagtgcgacatgccagaatgattaatgaaatatcaatatgagaaaattacagataattccattgtcaggttctcttctcattttcgtggtttaaccacgattatgtgattgcctccgcaattcctgtctctaactccccttcctcgcaaaaactggcactccacgagcatgtgtttagacagtttcattaacgtaaacggttgctttttactctggcgggcgaaaggagaaacactgatgagcgccatagattcccaacttcccagttcttctgggcaagaccgcccaactgatgaggttgaccgcatattaagtccaggaaagctgatcatactcggtctgcaacacgtccttgtcatgtacgcaggtgcagtcgctgttcctcttatgattggtgaccgactgggcctcagtaaagaagctattgcgatgctcattagcagcgatctcttttgctgcgggatcgtcacattattgcaatgtatcggtatcggccgctttatggggatccgcctgccggtgattatgagcgtgacctttgctgctgtaacaccaatgatagccattgggatgaacccggatatcggcctgctggggatatttggtgccactatcgccgcgggttttatcaccacattattagcgccacttatcggtcgcttgatgcctttattcccgccactggttaccggtgtggttattacttctatcgggcttagcatcattcaggtgggtattgactgggccgccggaggtaaagggaatccgcaatatggtaatcccgtttatttaggtatctcctttgccgtcttaatttttatcttgctcattactcgctatgcgaaaggatttatgtccaacgtcgccgtattactggggattgtatttggctttttacttagctggatgatgaatgaagtcaatttatccgggctacatgatgctagttggtttgcgattgttacgccgatgagctttggtatgccgattttcgatcccgtttccattctgaccatgactgccgtgttaatcatcgtgtttatcgagagtatggggatgttcctggcactgggtgaaatagtcggtcgtaaactctctagccacgatattattcgcgggctgcgtgtcgatggcgtagggacaatgataggcggcacgtttaacagcttcccccacacgagtttttctcaaaacgttggcctggttagcgtgacgcgcgttcatagccgctgggtgtgtatttctagcggaattatattaatcctgtttggcatggtgccaaaaatggcggtgctggtagcctccattccgcaatttgtgctgggcggcgctggtctagtgatgttcggcatggtactggcgacagggattcgaattctgagccgctgtaactacaccaccaaccgttacaacctctatattgtggcgatcagtctcggcgttggcatgactccgacgctctctcacgatttcttttctaagttaccggccgtactgcaaccgctgctacatagcggcattatgctcgcaacccttagcgccgttgtgctgaacgtcttctttaatggctatcagcatcatgctgacctggtgaaggaatccgtctctgataaagatttaaaagtcaggacagtacgtatgtggcttctgatgcgcaagctgaagaaaaatgagcatggagaataatatgaattttttaatgcgcgctatattcagtctgttgttgctttttactctctctattcctgtcatttctgactgtgttgcaatggccattgaaagtcgcttcaaatatatgatgctacttttttaaatggtttttacctgtcggcatccgctcaaaacgggcggttgtcgataaacgctcacttggttaatcatttcactcttcaattatctataatgatgagtgatcagaattacatgtgagaaattatgcaaacggaacacgtcattttattgaatgcacagggagttcccacgggtacgctggaaaagtatgccgcacacacggcagacacccgcttacatctcgcgttctccagttggctgtttaatgccaaaggacaattattagttacccgccgcgcactgagcaaaaaagcatggcctggcgtgtggactaacagcgtttgtgggcacccacaactgggagaaagcaacgaagacgcagtgatccgccgttgccgttatgagcttggcgtggaaattacgcctcctgaatctatctatcctgactttcgctaccgcgccaccgatccgagtggcattgtggaaaatgaagtgtgtccggtatttgccgcacgcaccactagtgcgttacagatcaatgatgatgaagtgatggattatcaatggtgtgatttagcagatgtattacacggtattgatgccacgccgtgggcgttcagtccgtggatggtgatgcaggcgacaaatcgcgaagccagaaaacgattatctgcatttacccagcttaaataaaaaaaccccgacatttgccggggttgtgagcataacgtaatgcttattttaccggacgcatcgccgggaacagaataacgtcgcggatggtatggctgttggtgaacagcattaccatacggtcgataccaattcccagacctgctgtcggcggtaagccatgttccagtgcggtgacgtaatcttcatcgtagaacatcgcttcgtcgtcacctgcgtctttcgcggcaacctgatccaggaagcgttgcgcctgatcttccgcgtcattcagctcgctaaagccgttaccgatttcacgaccaccaatgaagaactcaaagcggtctgtgatttccgggttaacgtcgttacgacgcgccagcggagaaacttctgccggatattcagtaatgaaggtcggctgaatcagatgtgcttctgccacttcttcgaagatctcggtaacgatacggcccagaccccagctcttctcaacgtggatgccgatagattcagcaattgctttcgcagagtcgaagttgtccagatccgccatgtcggtttccgggcgatatttcttgatcgcttcacgcatggtcagtttttcgaacggtttaccgaagtccagcgtcacgtcgccgtaggtcacttccgtcttaccgagaatatcctgtgccagagtacggaacaggctttcggtcagctcgatcagatctttgtaatctgcgtaagccatgtagagttccatcatggtgaactctgggttatgacgtacggaaataccttcgttacggaagttacggttgatttcgaatacacgctcgaagccaccaaccaccagacgcttgaggtacagttccggcgcgatacgcaggtacatgtcgagatccagcgcgttatggtgggtgataaacggacgcgcagcggcaccgccagggatcacctgcatcatcggcgtttcaacttccataaagccgcggttcaccatgaactggcgaataccagagaggatctggctgcgcactttaaaggtgttgcgggattcatcgttggagatgagatcgagataacgctgacgatagcgcgcttcctgatcctgcaagccgtggaatttatccggcagcggacgcagtgctttggtcagcagacgcaactcggtgcagtggatagacagttcgccggttttggttttgaacagcttacctttcgcgccgaggatgtcgccgaggtcccattttttgaactgctcgttataaacgccttccgggagatcgtcacgggcaacgtacagctgaatgcgaccgccaacgtcctgcagggtaacgaaagacgctttacccataatacgacgggtcatcatgcggccagcaacggcgacttcgatgttcagcgcttccagttcttcgttctctttgccgtcgaattctgcgtgcaattggtcagaggtatgatcgcgacggaaatcgttcgggaaggcaatcccctgctcgcgcaggttcgccagcttctcacgacgcgttttcagttcattgttaagatcgactaccgcgtcagcgccctgtgcgtgttgttcagacatgttggttcctcataaccctgctttcaaacttgcttcgataaattgatccaggctgccgtccagcacggcctgcgtgttgcgggtttctaccccggtgcgcagatctttaatgcgggagtcatcaaggacataagaacgaatctggctgccccagccgatgtcggatttgttatcttccatcgcctgtttctcggcatttttcttctgcatctccagttcataaagcttcgctttcatctgcttcatggcctgatctttgttcttgtgctgggaacggtcgttctggcactgggtcacgatcccggtcgggatgtgggtaatacgcaccgcagattcggtacggttaacgtgctgaccgcccgcgccggacgtgcgataaacgtcaatgcgcagatccgccgggttgatttcgatatcaatatcatcatcaacttccggataaacaaacgcggagctgaagctcgtgtggcgacgaccgccggagtcaaacgggcttttacgcaccaggcggtgaacgccggtttctgtacgcagccagccgtaagcgtaatcgccggagattttgatcgtcacggatttaatacccgccacttcaccttcgctctcttcgatgatttcagttttgaaaccacggctttctgcccagcgcagatacatacgctcaagcatgctcgcccagtcctgtgcttccgtaccgccagaccccgcctgaatatcgaggtagcagtcggcgctgtcatattcgccagagaacatacggcggaactcaagctgcgccagtttttcttccagggcgtcgagttcagcaacggcttcgttaaaggtttcttcgtcgtcagcttctacagccagttccagcagaccagaaacatcttccagcccctgtttcatttggtcgagggtgtcgacaacggcttcgagggaggaacgctctttacccagcgcctgtgcgcgttcgggttcgttccagacatccggctgttccagctcggcgtttacttcttccagacgctctttcttggcgtcgtagtcaaagataccccctaagaacgtcggagcgttccgtgaggtcctgaatgcgattatttaccggattaatttcaaacatggtctgatttcttttattgagctagtcaaaatgcggtgataagagcgggattgtacccaatccacgctcttttttatagagaagatgacgttaaattggccagatattgtcgatgataatttgcaggctgcggttgccgcgaaactcgttgatatcgagcttataagccagttgcacttcgcgcacgccgttatccggccagagggcggtatcgacattaaaagcaataccatccagcagtggaccgccgccgaccggttcgaccatcaccttcaaatgacgttcgcccaccagccgctgttgcagcagacggaaatgaccgtcaaacagcggctccgggaacatctgcccccacgggccagcatcgcgcagcagctgcgccacttccatggtcatttcggccgggcttaacggaccgtcacttaccacttcgccttgcaataggctagggtccagccactcagtaaccagttcgccaaaccgttgttgaaagagtttgaatttatcctcttccaggctcaaacccgccgccatcgcatgaccgccaaacttcagcatcatgccagggtagagtgtgtctaatcgctccagcgcatcacgcatatgcagcccctgaatggagcgaccggaacctttcagcgtaccgtcacctgctggcgcaaacgcgataaccggacggtgaaaacgctctttgatgcggctagccagaataccgacaacgccctgatgccattcggggtgatacattgccagcccgccgggtagcgtgtcacggctgcgctccagtttctcgcacagggtcagggcttcaatttgcattccttgttcgatctcttttcgcgtctggtttagcgcatcgagttcatttgccagcacgcgcgcttcgccgatgttgtcgcacaacaacagcgccacaccgacggacatatcgtccagtcgtccggcagcattgagacgtggccccagcgcaaaacctaaatcgctggcggcgagtttttgtgcatcacggtttgccacttcaagcagcgctttaatccccggacggcactttccggctcggatgcgactcatcccctgccaggtcagaatgcgattattagcgtccagcggcacgacgtccgccactgtccccagcgcgaccagatccagcagttctgccaggttaggaattgcgatgttacgctcatcaaaccagccctgatcgcgcaaaaaggtgcgcagcgccagcatcagataaaacgccacacccacgcctgccagacttttgctcgggaaattacagtcgcgcaagttagggttaatgatcgcttccgctgcgggtaatgtgtcgcctggcaaatggtgatcggtaacaataaccgggatgcccaagctgcgagcgtgctcaacccccgcatgggaggaaataccgttatccaccgtgacaattaactgcgcgccacgggcatgggcctgatcgaccacttccgggcttaagccgtaaccgtcttcgaaacggtttggtaccaggtagtcgatattgctgcaaccaaggctgcgcatcgccagcacgcttagagccgtgctggtcgcgccgtcggcgtcgaaatcaccgaccacaataatccgcgttccttcgcgaaaagcgttgtaaaggatctcaacggccttttcgacgccgctcagttgctgccagggcagcatacctttaacactgcgttccagttcttgcgcactgcgtactccccggctggcgtataaacggcgcagcaagggaggcaattcagcgggcaagtctgccgtttcatcgacttcacggcgacgaagttgtatctgttgtttcacgcgaattatttaccgctggtcattttttggtgttcgtcgaggaattctttcatctctttcggcggctggtaacccggaacaagtgtgccattgctcagcacaactgccggagtaccgctaacgccaagctggacgccaagtgcgtaatggtcggcaatatccacgtcgcaactggctggtgcgacgcttttacctgccatcacatcatcaaacgctttgtttttatctttcgcacaccagatagctttcatttctttctctgcatcgctgtccagcccctggcgcgggaaagcaagataacgcacggtgatccccagcgcgttgtagtctgccatttgctcatgcagtttgtggcagtaaccacaggtaatatcagtaaacacggtgatgacgtgtttttcctgcggcgctttataaacgatcatctctttttcaagcgcattcaactgctttaacagcatcttattggtgacattgaccggagccgtgccactaacgtcatacattggcccctgaatgatatgtttaccatcatcggtgatgtacaacacgccgctgttagtcagaactgtcttcatgccagctacaggcgcgggctgaatatcgctgcttttgatgcccattttggctaacgtttgttgaattgccgcgtcatcagcctgagcaaagccactaaacgccgctaacaaagtaaacaacataaaacctttcttcataaatcttcccgttcttttcagacatcacgcccgcgggtgatgctgttgatgaagttgccgcagacgctcggtagcgacatgcgtataaatttgcgtggtggagagatcgctgtggcccagtagcatctgcaccacgcgtaaatccgcaccatgatttaataaatgagtggcaaaagcgtgacgcaacacatgcggactcagcttttcgctgtcgatacccgccagcacagcataatgtttaatacggtgccagaaggtctgtcgcgtcatctgctgcgcacgctggctgggaaacaacacgtcaatactcacaccattcagcagccacggacgcccatgttccagataggtttccagccagtaaaccgcctcttcacctaacggcaccagacgctctttgttgcctttaccaatgacccgtaccacgccctgacgcaggctgatatcactcattgtcagtccgaccagttcagagacacgcagcccggtagcatacaacacttcaagcatggctttatcgcgtagctccagtggctgatcgattaatggtgcctgtaataaacgttcgacctgcgcttcgcttaaatcttttggcaaacgctggggcaatttcggactagcgagatgcgcactgggatcgtcttcacgaaacttttcgcgataaagatactggaacaatcggcgcactgcactcagcaaacgcgcactgctggtggctttatacccgccctccagccgttctgccagtaatgcctgcaaatcgtcactttgcgccgtcgccagcgtcaacccgcggtgatgcaaccactccaccatcatactcagatcgcgacggtaagcgttcaacgtattttcagccagatttttttccagccacagagcatcaagaaactgctcgatgcgtgccagatcctgtttcacttgcgccccttatggtcactcatttgatccattatgccttattgtgccgtgactaaagcgattctgatacactagccgcaaaagccacagcagaatcgagaagcttacgttatgaatatgggtcttttttacggttccagcacctgttacaccgaaatggcggcagaaaaaatccgcgatattatcggcccagaactggtgaccttacataacctcaaggacgactccccgaaattaatggagcagtacgatgtgctcattctgggtatcccgacctgggattttggtgaaatccaggaagactgggaagccgtctgggatcagctcgacgacctgaaccttgaaggtaaaattgttgcgctgtatgggcttggcgatcaactgggatacggcgagtggttcctcgatgcgctcggtatgctgcatgacaaactcagcaccaaaggcgtgaagttcgtcggctactggccaacggaaggatatgaatttaccagcccgaaaccggtgattgctgacgggcaactgttcgtgggtctggcgctggatgaaactaaccagtatgaccttagcgacgagcgtattcagagctggtgcgagcaaatcctcaacgaaatggcagagcattacgcctgatctcactgacggcttagcgcatatgctttgccgtcatctttatctttgcgtctcttgttgcaacaaaatccgccgtaaatcccgccattcagcttcgtccatgctgtcggctgccagccataaatgttgccgtttaccgccatcagaacgtaaacgcagcatcatgccgctcttaatcatccacggtgctttgacgatgctccactcctgcccttgccaacgcaaacgcccgtccatcaacaagcgaatttccccctggcgagcattaatacgccgctggctgcgaacgcaatcaaacaccaccaggctaagtaacaccatccataacggggtgtaactgagtggccagggcatgagtaaaataacagcggcaaccagcccatgaatcagcaaggaaagccactgtgcgcgccaggagacgcgcaaatcagattgccacaggaccacgttcccggttccgtgtctggatgagtcggaccatcatttccagttctgcatcggccggtttaccgtgattcatcagccagttaaacaggtccggatcgtcacattccagcagacgaataaagatgcgtttttcgtcatcgcttaagctgtcgtactcatgttcgaaaaacggcatgatactaatatcgagttcgcgcataccacggcggcatgcccaatgaatgcgggctttgttgttaatgtccatcttcttcctgtctcacgaaaatccagtacccggctattgtaacgtgtttttcgccttcttttacgggaatatcagtaaacaccatcgcgatcgcgaaattaattcacaacaattcaatggcttcatttttttggaagtcgcctcgcagaaggcacagatcgcgtagtgaaagcacttgcattgcctcatagctcttttaccattagtcattaatacgccgttaagcaactcaggactctattatggcttttacaccttttcctccccgtcagcctacggcttctgcccgtttaccgctgacgctgatgacgcttgatgactgggcgcttgccaccattactggcgcggacagcgaaaaatatatgcagggtcaggtgacagcagatgtcagccagatggcagaagatcagcacctgctcgccgcccattgcgacgccaaaggtaaaatgtggagcaatttacgtctgttccgcgacggcgatggctttgcatggattgaacggcgcagcgtgcgtgaaccgcagctgactgaactgaaaaaatatgcggtattctctaaagtgaccatcgcgccagacgacgagcgtgtgctgcttggtgttgccggttttcaggcgcgcgccgcgctggcaaatctctttagcgaactgcctagcaaagaaaaacaggtagtcaaagaaggcgcgaccactttgctatggtttgaacacccggcagaacgtttcctgatcgtaaccgatgaagctactgctaatatgctgaccgataaactgcgcggtgaagcggaactgaacaatagccaacagtggctggcattaaacattgaagcgggtttcccggtgattgatgccgccaacagcgggcagtttatcccacaggcgaccaatctccaggcgctgggcggtatcagctttaagaaaggctgttataccggacaagagatggtggcgcgagcaaaattccgtggtgccaataaacgtgcgctctggttgctggcaggtagcgccagccgactgccggaagctggtgaagacttagagctgaaaatgggcgagaactggcgtcgtaccggtacggtactggctgcggtaaaactggaagatggtcaggtcgtggtacaggtcgtcatgaataacgatatggaaccggatagcatcttccgcgtacgcgacgatgcgaatacattgcatatcgagccgctgccgtatagcctcgaagagtaaatctctttatcgcatcaggcatttatcgcctgatgcgacgctggcgcgtcttatcatgtctgggatttgatgcctttatcacaacagggacgaggcccgtagatcggataaggcgttcacgccgaatccggcagttgtgctccgatgcctgatgcgacgctggcgcgtcttatcaggcctacaaaggcatacccattacgcctgcccaatatacaaatagatcgccagaaagtggcacacactaccgccgagcacgaagccgtgccagatggcatggttgtatggaatgcgtttgcagacgtagaaaatcaccccgaggctataaaccacgccgcctaccgccagtaaggtaacgctgcccgccgcgagcttaactgccatttcataaattaccaccaggctcagccagcccatcgccagataggtcaccagagataaaattttgaatcggtgcgcgatggtcagtttaaacagaatacccagcaatgccaggctccagataacaatcatcaacccgcgcgctaacggagaatccagccccaccagcaaaaacggcgtgtaggttccggcaatcaacaggtaaatagcgcaatggtcaaatttcttcagccacatttttgcccgttgatgaggaatggcgtgatagagcgtgctagcgaggaacagcaggatcatactgccgccatagaggctgtagctggttatcgctgtggcgctggcattaagatccaccgcctgaaccagtagcaacaccagcccaacgataccaaacaccaacccaatgccgtgactgacgctgttggctatttcctctgccagactatatccctgcttaatgaggggcttctgaaccataacttactccggagaaacgtacacgcacatgtatacctctccagcgtaactgagaatagttccagtgaacacctgttagctaaaataaattctgatttgagactaatctcctaaaaatcatgaaattaaatgcgaaatttcaactaacaggcgtgagttcaatttaaagacatttaaattcaatcacataaaattgtgtctgaccgggatagatgtcagcaatgacttttttcagttcagtcagggtcatattttcctgctctgcatgtttttcagtcagcgtatccagcgttacggtactggttgcggtgacttcaatcgtgcaaaaataaccgtcatcttcaaaacgtccgacacgaagcacatcacccgttttgaagtggctttcagactcgtcgcggatggtgatggttttacgcccagccagaatgtcatcctggaaacgttgaaaaaaagtgatgtcgtttggctgcatggtactatttcctgtaagaattgactcatctggagcctatgatagtgaaaaaactcaccttaccgaaagatttcttatggggcggcgcagttgccgctcatcaggtcgaaggcggctggaacaaaggcggaaaagggccgagcatttgtgacgttctgaccggtggcgcacacggcgtgccgcgcgaaatcaccaaagaagtcttgccaggaaaatactatccaaaccatgaagccgttgatttttatggtcactataaggaagacatcaagctatttgccgaaatgggcttcaaatgttttcgtacatccattgcctggacgcgcatttttccaaaaggcgatgaagctcagccaaacgaagaagggctgaagttctacgatgatatgttcgatgaactgctgaaatacaacatcgaaccggtgatcaccctctcccactttgaaatgccgctgcatctggtgcagcaatacggtagctggaccaaccgtaaagtggttgatttctttgtacgtttcgcggaagtggtatttgaacgctataagcacaaagtcaaatactggatgaccttcaacgaaattaacaaccagcgtaactggcgtgcaccgctgttcggttactgctgctccggcgtggtgtataccgagcatgaaaacccggaagagacgatgtatcaggtgctgcatcaccagtttgtcgccagcgccctggcggtgaaagctgcgcgtcgcattaacccggagatgaaagtcggctgtatgctggcgatggtgccgctctatccttactcctgtaacccggacgatgtgatgttcgctcaggagagcatgcgcgaacgctacgtctttaccgatgtgcagctacgcggctattacccgtcctatgtgttgaacgagtgggagcgtcgcggatttaacatcaaaatggaagacggcgatctggatgtgctgcgtgaaggcacctgcgattatcttggtttcagctattacatgaccaatgcagtgaaggccgaaggcggcaccggcgatgcgatctctggttttgaaggcagcgtaccaaacccgtatgttaaagcatctgactggggctggcagattgatccagtaggtctgcgctatgcactttgcgaactgtatgagcgttatcagaggccgctgtttattgtcgaaaacggttttggcgcttacgacaaagtggaagaagatggcagcatcaacgacgactaccgcattgactacctgcgcgcccatatcgaagagatgaaaaaagcggtgacttacgatggcgtggatctgatgggctacacaccgtggggctgcatcgactgcgtgagcttcaccaccgggcagtacagcaaacgctacggctttatctatgtgaataaacatgacgacggtactggcgatatgagccgtagtcgtaagaagagctttaactggtacaaagaggtgattgccagcaacggcgagaagctttaagtcgatgaagtaccggatgcaatacttgttgcatccggtcagacaacttccctgttttatttcccgcccgccaaatcgataaaacttcccgtgacgtaagaggctttatcacttagtagccagacaatggcctgcgcgacctcttctgcctgtccaccacgctgcatggggatgttgctcttaacgcgatcgacgcgtccaggctcgccgccgctggcgtgcatttcggtataaataaaccctggccgcacgcagttaacgcggatcccctgcgcggcgacttccaggcttagtccggtggttaacgtatcaatcgcccctttgcttgccgcgtaatcaacatattcccctgggctacccaaccgactggccacgctagagacattgacgatagcgccgccactgccaccatttttaagcgccatgcgttttaccgcctcgcggcagcagagaaaatatcccgtcacgttggtggaaagtactcggttgattcgctctgcggtaaggttttcaacggtgcactgggtaaacaagatcccggcgttattgaccagcgctgctagcggttcatcgtgctgatcgattgctgtaaacatcgcaacgacctggttttcgtcgctgatatccgcctggagcacgaatgctttgccaccggcttgcgttattaagttcatcacttcctgcgccgcgtggaggttttgctgataattaaccgccaccgtatacccttcttgcgccaacagtaatgcagttgcccgcccgatgccgcgactgccaccagtcacaagtgctatagccatttgtttttccgagaaaaattaattcgttgacgtatctttgagattgctaacaaactggctcaatcttcaatgttggcacgcttttccccctcgccctttcagggagagggccggggtgagggtaaatattcgcgccagtgccggcctgttcccctcaccctaaccctctccccaaaggggcgaggggactgtctgagcacttttgtactttgtcatctgactaaaaaggcgccgaagcgcctttagaaaatagtcgaatcagtgaattactggtattcgctaatcggtacgcaggagcagaacaggttacggtcgccgtaaacatcatccagacgtttcactgtcggccagtatttgtctgccacacctgccgggaataccgcaacttcacggctgtacggatgcgcccactcggcgaccagttcgctctgaatgtgcggcgcgttcaccagcgggttatcttccagcggccagacaccggctttcacctggtcaatttctgcgcggatagccagcatcgcgtcgataaagcgatccagttccactttgctttcagattcagtcggttcaaccatcagcgtacccgccaccgggaagctcatcgtcggcgcgtggaaaccgtagtcgatcaggcgcttggcaatatccagctcgctgatgccggtttcttctttcagcgggcgaatatcgagaatacattcgtgcgccacgcgaccgtcgcgaccggtatacagcaccgggaaggcatcctgcaggcggctggcaatatagttggcgttgaggattgccacctggcttgcttttttcagcccttctgcgcccatcatgcggatgtacatccagctgattggcaggatagaggcgctaccgaacggtgccgcagaaaccgcgccctgacgggttaacatgccttcgatttgcaccacgctatgacccggtacaaacggtgccaaatgcgctttcacgccgatcggtcccatacccggaccaccaccgccgtgcggaatgcagaaagttttatgtaggttaaggtgactaacgtccgcaccaataaagcccgggctggtgatgccaacctgggcgttcatgttcgcgccatcaaggtaaacctgaccgccgaactgatgcacgacttcacacacttcacggatcgtttcttcatacacgccgtgggtagaaggataagtcaccatgatacaggagaggttatcgcccgcctgttccgctttcgcgcgcagatcagtcagatcgatgttgccgtttttatcacacgccacaaccaccacctgcattcctgccatatgtgcagaagcggggttagttccgtgcgcagaagccgggatcaggcagatatcgcgatgcccttcgttgcggctttcatgataatgacgaatcgccagcaggcccgcgtattcgccctgtgcgccagagttcggctgcatacaaacggcgtcgtaaccggtcagtttcaccagccagtcagccagctgcgcaatcatctgctgataaccttcggcctgctccggcgggcagaacgggtgcagttcggcaaattccggccaggtgattgggatcatctcggcggcggcgttcagtttcatggtgcaggaacccagcgggatcatcgcctgattcagcgccagatctttacgctccaggctgtgcatatagcgcatcatttcggtttcgctgtggtagcgattaaacaccggatgggtgaggatttcgtcgtcgcgcagcatcgcaggctggatagagcggctgtcgtgagccacgtctttgtccagcgtgtcgatgtccaggccgtggttatcgcccagcagcacgttgaaaagctgcattacgttttcacgcgtggttgtttcatcaagggtgatcccaaccgcgttcagaatatcgctacgcaggttgatttcagccgcttcggcacgcgtcagtacgcccgctttgtcggccacttccacacacaaggtgtcgaaatagtgcgcatggcgcagtttcagacctttttgttgcaggcccgccgccaggatatcggtcagacggtgaatgcggttagcgatacgtttcaggccaaccgggccgtgataaacggcatacaggctggcgatgtttgccagcagtacctgggaagtacaaatgttggagttcgctttctcacggcggatatgttgctcgcgagtctgcatcgccatgcgcagcgcggtattgccagctgcatctttgcttacaccgataatacggcccggcatactgcgtttgtattcatctttcgccgcaaagaatgccgcgtgtgggccaccgtagcccatcggcacgccgaagcgttgcgcgctaccaaaaacaatatccgcgccctgtttacccggcgcagttaacagcaccagcgccataatatcggcggcaacgctgaccacaattttgcgacttttcagttcgctaataagcgcagtgtagtcgtgaatttcaccggtagtgcctacctgctgtaacagcacgccgaagacgtcctgatggtcgagcactttttgcgcgtcatcgacaatcacttcaaaaccaaaggtttcggcacgagtacggaccacatccagcgtttgcggatgcacatcggaagccacgaagaagcggttggcatttttcagtttgctgacgcgtttcgccatcgccattgcttcggcggcagcggtggcctcgtccagaagagaagcagaggccatatccagtccagtcaaatccagcgttacctgctggaagttgagcagtgcttcaaggcggccctgggagacttcaggttgatacggagtgtacgcggtataccagcccggattttccagcatgttacgcaggataaccggcggtagctgcacggcggtgtaacccatgccgatgtaagacgtgaagcgtttattgcgactggcaatagccttgagttctgccagtgcggcgtattcggtcgccggtgcgccaacctgcggtggtgtcgcaagttgaatatctttcggcacaatctggccggtcagcgcgtttaagctttgtgcaccaacggcattcagcatttcttgctgttgcgcggcgtccggtccgatatggcgttcaataaaagcgccgctgttttcaagctggcttaacgtctgtgtcatgagcgatggttcctgaaacgtgcagtgaattgtgaacctctctccttacgaagagagtgagggtgaggcataaattttcctcaccctgatcctctcccgcagaagaggaataaagccgttactcgtcttctaacaatgcttcgtatgcggtcgcatccagcagactttccagttcgctttcatcgctggctttgattttaaagatccagccgcctgcatacggttcgctgttcaccagttccggggaatcgctcagtgcgtcgtttaccgccacgatttcaccgcttactggcgcataaatgtcactcgccgcttttacgctttcggcaaccgcgcagtcatcgcccgcgctaaccgttgcgcccacttccggcaggtcaacaaacaccatatcgcctaacagctcctgagcatgttcggtaataccaacggtgtaagtgccgtcggcttctttacgcagccattcgtgttctttgctgtatttcagttctgctggtacgttgctcatcaatcaatctccaaaaaagtaaatcacgcgacggctttgccgttacgcacaaaaacaggttttgtcactttaaccggcatttcacggttgcgaatttgcacaatcgccgtttcgccaataccttccggcacgcgcgccagcgcaatgctgtaacccagcgtcggggagaaagtaccgctggtgataatgccttcatgctggttgccctgcgcatcggtaaagcgtaccggcagttcattacgcagcacgcctttttcggtcatcaccagaccaaccagtttttctgtaccatgctcacgctgcacttccagggcttcacgaccgataaagtcacgatctgccggttcccaggcgatggtccagcccatgttggcggctaaaggagagatggtttcgtccatctcctgaccataaagattcatgcccgcttccagacgcagcgtgtcacgcgcgcccaagccacatggcttaacacccgcttccaccagcgcacgccagaaatcggccgctttttcattgggcagcgcaatttcatagcccgcttcaccggtataaccagtggtggcaataaacagatcgcccgcctgcacgccaaagaacggtttcatcccttccaccgcctgacgctgggcgtcattaaacagtgtggcagcttttgcctgcgcattcggcccttgcacggcaatcatggaaaggtcatcacgaacggtaatttcgatgccgaaaggttcagcgtgttgggtaatccaggagaggtctttttcgcgggtggcggagttaacaacgaggcggaagaaatcttcagtaaagtagtagacgatgaggtcatctatcacaccgccagaggcattcaacatcccgctgtaaagggctttgccgcttttggtgagcttcgccacatcgttcgccagcagataacgcagaaactcccgggtgcggctgccgcgaagatcgacgatggtcatatgactcacatcaaacattccggcatcggtacgtaccgcatgatgttcgtcgatttggctaccgtaatgcagcggcatcatccagccgtggaaatccaccatgcgagcgccgcaaagcgtgtgttgttcgtacaaaggagtctgttgtgccatcttgtcctcattgaataagcggggctgacaactttttcatggtgaaattatcaccacgaaacccagcatcggagccactcccggtccccaacgcaatcgttctcttttgcctgaacttaccaccgaaacagactgttaaccataaggtaaaattgatcatcacattagcttatggttaaaaaatgcaaaaatcgcgacagaataaaaaaccaaaaaatacaccagtttctatacaaagatgatgtgatgagaaagtcaatttgaataagacaatattaagagctaaaaaaatgtcaaaaaacactaaatcaaaaaataatggcattagaaaatataatgcgaaaacggaggtgaaattagtttatttcaaatgaggaaaatctcccggcgaaaaaaccgggagatgaaagtgtgatgggtatcaaataaacaacagaggagaaatttttaacgcagccattcaggcaaatcgtttaatcccattgcctggcggataagttgcggcttaacgccaggaagcgtgtcggccagtttcaaaccaatatcacgcagcagttttttcgccggattggtaccggaaaacagatcgcggaatccctgcataccagccagcatcaacgccgcactgtgcttgcggctacgctcatagcgacgcagataaatgtactgcccgatgtctttcccctgacgatgcaaccgtttcagttcggcaatcagctctgcagcatccataaagccgagatttaccccctgccccgccagcgggtgaatggtatgtgcggcgtcgcccaccagcgccagacggtggctggcaaactggcgcgcataacgccccgtcagtgggaacacctgacgcgcgctctcaaccttgcataagcccaggcgattatcaaaagcgatatttaacgcgcgattaaattcgtcttcacttgcctgctgcatccgctgcgcttcctctgggctcagactccagacaatgctgcaaagatgcggatcgctaagcggtaaaaaggccagaatgccttcgccatggaaaacctgccgcgccaccgcatcatgcggttcttccgtgcgaatggtcgctaccagcgcgtgatgctgataatcccagaaagtcagcggaatatcggctttgttgcgcaaccaggaattagcgccgtccgcgccaatcaccagacgcgccgttaacatgctgccatctttcagcgtcaggaaggtttcattttctccccaggcgacctgctgtaattctgcgggggctaacagagtgatatcactgctctgatgcgctttgttccacagcgcgtagtgaatcacactattttcaacgatatgcccaagatggctatagcccatgctttgatcgtcaaagctaatgtgaccaaagctgtctttgtcccacacttccataccgtgataacagctggccctacgagagagaatgtcctgccagacgccaagacgggtgagtaatttttcgctggcggcattgatagcgctaacgcgcagttgtggtggtgcattcgccgccagaggttcctgtacgcgctgctccagtacggcaacgcgtaagccgctcccctgtaagccacaggcaaccgccagccccaccatgccgccgccaacaatggctacatcaacactttgcattgtttattccttaaaaccgccttcaacgcgccacccaaccgagggtgcgctgcgccagcacatcgcgtgccggggtgaataattccatcgtcatcagcccgatgttgcgcccgacaaccagcggtgcccaacggttggcaaaaagatgtacaaggctgtccgtgacgccaatggttgcttcgcgatcgctctgtcgacgctgctgataacggcacaatacgccgtaatcccccatgtcttctccgcgctcctgcgcctgagtcagggtttccgcaagactcatcacatctcgcataccgaggttaaacccttgcccggcaatcgggtgcagagtttgcgccgcattgcccaccagcacggtacgatgggtaatagatctggcggcgtgggttaacgccagcggataagcactgcgtttaccagcgtgggtaattttcccaagtcgccagccaaaggcgctctggagttcacggcaaaacttctcgtcactccagctcaacacctcttcgcgccgttccagtggatgacaccagaccaggctacagcgtccgtcagacatcggcaacatcgccagcgggccatgttgcgtaaagcgttcaaaagcgcgcccttcatgcgcaacggaagtagcaacgttggcaatcacggccagttgttcgtaaggctcctgctgccagtcaacgccgcacgcggtggctaacgcactatgggtgccatcagctgctaccagcacgcggcccgtcagcgtctcgccactctccagcgtcacttcaacgtgactctgagtacgggcaacgttagccacgcgatcagggcaatgcagcgttacgccaggtgctttacgcagcaatgcaaacagccgttgcccgacattgtgcaattcgacaacctgtcccagcgccgccagttggtaatcttctgcggcgagggtgacaaatccagcgtgaccacgatcgctgacatgcacggtggtgatggcagttgcgcaatccgccagagattgccagacgccgatgcgcgccagttgctgacaggtacccgccgccagcgctatcgctcgtccatcaaagcccggatgagcatgactctctggcgcagtcgcttcaatcaaatgtaccggcagcgccccgtgacttaaccgggaaatagccagcgccagcgtcgcgcccgccatgccgccaccgacgatgattacgctcattgctttctcgcagcaaccatcaacgcttcgatttcttccggctttttcaccacgctggcggtgaggttttcgttaccggtttcggtaatcacaatgtcgtcttcaatacgaatgccgataccgcgatattgttctggcacttctgcatccggcgcaatatacagccctggctctacggtcagtaccatgcccggttccagaatgcggctgcgatcctgaccataaacacccacgtcatggacatccagtcctaaccagtggctaaggccatgcataaagaaaggacgatgggcgttctgagcgatcagttcatcaacatcacctttcaggatgccgagttttaccaggccgctaaccatgatgcgcaccacttcaccagtgacttccagaatggaagttcccggacgatacaggcgcaggctggtttcgagagactccagcacaatgtcgtagatttcacgctgggcctgggtgaatttgccgttgaccgggaaggtgcgggtaatatcgccagcgtaacctttgtattcacaacccgcgtcaatcaacaccaggtcgccgtcgcgcatttcacactcgttttcggtgtagtgcagaatgcagccgttttcaccgctgccgacaatggtgttataggacggatagcgcgcaccgtggcggttaaattcgtggtgaatttcgccttccagatggtactcgaacattcccggacggcatttttccatcgcccgtgtatgtgccatggcggtgatttctcccgcgcggcggagtacggcaatctcttctgggcttttgaacaggcgcatttcatgaacaacaggacgccagtcgatcatcgttgccggtgcggtgagattttgccggctacctttacgcagtttttccagcgcactgttcacgattacatcagcatatgcatattcgccctgggcatggtaaaccacatccaggccgttaagtagttgataaagttgctgattgatttcgctgaatgccagtgcgcggtcaacgcccagtttctctggcgcggcatcctggcctaagcgacggccaaaccagatctccgccgtcaggtcgcgaacgcggttaaacagaacgctgtggttatgagtgtcatcgcttttaatcagcaccagcaccgcttccggttcgttaaagccggtgaagtaccagaagtcactgttctgacgataggggtattcgctgtcggcgctacgtgttacttctggtgcagcaaaaatcagcgcggcgctgccgggttgcatttgctccaccagggcctgacggcgacgctgaaactcttgccgggatatctcactcataacactctccttacgttttttgtttttagtgtagagtcggtttttgtacttctggcgcggtcggttgcggatgagtaaaggtgtcgtggcataacagcgcggcaacacgaacgtattcgatgatctcttcaaggctcatttcaagctcttcctgatcttcgtcttcgtcgtaacccagttgcgcaatgttacgcagatcgtcgatagcttcaccggtttcgccggtcactttatccagcttcggttgcgtaacgccaagaccaagcaggaagtgattgacccaacctgccaatgcatcagcccgatcgaaaacgctgacatcatcgccatcaggcagataaagctgaaaaaggaagccgtcatcctgcagggcatcgctggtggcagagtgcattttacgcagtgcctgtgccagctcatgaccgaaagccatgccttcgttcgtcaggtcgtgaagtagcggtagccaactgctgtcatcgttaccgccacatatcatcccgctgattaaaccatgcatctcagctggggtcagacccgtcccttgttggttcagatactggttcatttcgttgtaaccaggcatttcgttctgtatagacataagcattcgtcgtcaaagggaggaatattcatgatatgctaccactttgggccctggtggaccagaaaagggcttgtctcttctcatcagggtagctatagtgtcgccccttcgcagaccatgggtctaaagacgaaggcagcgcagtcaatcagcaggaaggtggcatgtctgcacaacccgtcgatatccaaatttttggccgtagtctgcgtgtgaactgcccgcctgaccaaagggatgcgttgaatcaggcagcggacgatctgaaccaacggttgcaagatctgaaagaacgcactagagtcacaaatactgaacagttggtcttcattgccgcattgaatatcagctatgagttagcgcaagaaaaagcaaagactcgtgactacgcggcaagtatggaacagcgtattcggatgctgcagcagaccatagaacaagcgttacttgaacaaggtcgcatcaccgaaaaaactaaccaaaactttgaatgacacttttcggtttactgtggtagagtaaccgtgaagacaaaatttctctgagatgttcgcaagcgggccagtcccctgagccgatatttcataccacaagaatgtggcgctccgcggttggtgagcatgctcggtccgtccgagaagccttaaaactgcgacgacacattcaccttgaaccaagggttcaagggttacagcctgcggcggcatctcggagattcccttcttatctggcaccagccatgacgcaactaccagaactcccactgacattatcccgacaagaaatccgcaaaatgattcggcaacgtcgtcgtgcgttaacgccggaacaacagcaggaaatgggtcaacaagccgctacccggatgatgacttatcccccggtggtgatggcacatacggtcgctgtattcctctcttttgatggcgaactcgacacccagccactcatagaacaactctggcgcgccggtaagcgcgtatatcttccagttttgcatccctttagtgccggtaatttgctgttcctgaattaccatccgcaaagcgaactggtgatgaacaggttgaagatccatgagccaaaattggatgtgcgtgacgtgctacccctttcccgattagacgtgctgatcacaccgctggtcgcctttgatgagtacggtcagcgcctgggaatgggcggtggtttttatgatcggaccttacaaaactggcagcactataaaacgcaaccggtgggttatgcgcatgattgtcagttggtggaaaaactccccgttgaagagtgggatatccctcttcctgcggtggttacaccgagcaaagtctgggagtggtaagggcgatacacccgcatcgccctgattgacatcgttgattctttgacctaatttagtgagtaagggtaagggaggattgctcctcccctgagactgactgttaataagcgctgaaacttatgagtaacagtacaatcagtatgatgacaagtcgcatcataacccttctccttcaagccctcgcttcggtgagggctttaccgttacagccccatgctgccctgccatcgtaaatccccattaaataaacacaacgcattgatctgactttgatttattttctggagcagactcgcaaagtagaatgcgcaacgcggcaacggtgtggagaagggataaaaaaacgggcaagtcagtgacctgcccgttgattttcagagaaggggaattagtacagcagacgggcgcgaatggtacccggaatagctttcattgcctgcagcgctttttcggcaacgtcttcgtcggcttcaatatcaataaccacataacccatctgggcggaagtttgcagatattgcgcggcgatgttgacgccctgctcggcgaagattttgttcagcgcagttagcacgcccggacggttttcgtggatgtgcatcagacgacgcccaccgtgcagtggcaggctgacttccgggaagttcaccgcagagagcgtactgccattgtcagaatacttgatcaatttacccgcaacttccaggccgatattctcctgcgcttcctgagtgctaccgccaatgtgtggcgtcagaaggacgttgtcgaattcacacagcggagaggtaaatggatcgctattggtcgccggttccgtcgggaatacgtcgattgccgcccccgccagatgtttgctcgccagcgcatcacacagcgccggaatatccaccacagtaccgcggctagcattaatcagcaggctgccgggcttcattagactaatttctttcgcgcccatcatatttttggtggacggattctctggtacatgcagactcaccacatcgctcatattcagcaggtcagaaagatgctgtacctgagtggcgttgcccagcggcagtttattttcaatatcataaaagtaaacatacattcccaggctttcagccagaatgcccaattgcgtaccaatatgaccgtagccgatgatacccagctttttgccgcgcgcttcaaaagaacccgccgccagtttgttccacacgccacggtgcgctttagcattggcttccggcacgccgcgcaatagcagcagcagttcgccaatcaccagctccgcaacagagcgcgtattactgaacggtgcgttaaataccgggatcccgcgctttgccgccgcatccagatcaacctggtttgttccgatacagaaacagccaatagcgaccagtttttctgcggcgttgatcacgtcttcagtcagatgggtacgggatcgcaggccgatgaagtgggcatcgcggatggattcttttaattgttcatcatccagcgcgcctttgtgaaattcgatgttggtgtaaccagctgcacgaaggctttccagcgccttttggtgcacgccttctaccagcagaaacttaatcttgtctttctccaggcttacctttgccatttacccaatcctgtcttttgaaatgttgtgtgcggatttgcatccgcctttcaacatatcaaaaaataatattgcggcaatatgaacgtttgcgtcgcgatgttgaggaaatatcacgcaaaggtaattcttggatgaatatgctggtttagaggatttatttagagcaatcgacaattgcctggtaaaagcgtgacacatgtcaccaaatttaatgaagagaatttttttaacgggggaggttcccccgtcagatcatttcacaatggttttgacaccgtcaggtgtgccaatcagcgcaacgtccgcgccacggttagcaaacaagccaacagtcaccacgccaggaatcgcatttatggcgttttccatcgctatcgggtcaaggatttccatgccgtggacgtcgaggatcacgttgccattatcggtcaccacgccctgacggtattccggacgaccgcccagtttcaccagctgacgcgccactgcactacgtgccatcgggataacttctactggcagcgggaatttacccagaatatcaacctgcttggaagcgtctgcaatacagataaatttttctgcaacgctagcaatgattttttcacgggtcagcgccgcgccgccgcctttgatcatttgcatgtggccgttgatttcatctgcgccatcaacgtagatgccaaggctgtcgacttcgttgagatcaaaaacgtgaatgccgaggcttttcagtttttcagtggaagcatcactactggaaacggccccttcaatctggcctttcattgtaccgagcgcgtcaataaagtgtgcggcggtggaacctgtacctacaccaacaatggtgccgggctgaacatactgaagtgccgcccatcctactgcttttttcaattcatcctgcgtcatgatcgtttcgcctgtggtatgaaatttcacacgcattatatacaaaaaaagcgattcagaccccgttggcaagccgcgtggttaactcatccataaaatatcgcgcaatggcaggcatcccctttcgccccgcaaataaagcatacaacggtctgggtatgccgctccacggtgcaaacaggcgcaccagttcaccgttcgcaagcccctgtttacaggcaaattgaggcaataacgccacgccattcaacacaaccagggcgcgaactcgctgagcgaaatgcattagcgcaaatccctgatcttttaagctgcgcttttaaccacggatacaaatgttacccgccgacggcttcggtatatgcaacctgacacaaaattgtgtcatagtgcaggaaaaagcatttaccaggagcagacaacagcaatgaaacgcccggactacagaacattacaggcactggatgcggtgatacgtgaacgaggatttgagcgcgcggcacaaaagctgtgcattacacaaagtgccgtcagtcagcgcattaagcaactggaaaatatgttcgggcagccgctgttggtgcgtaccgtaccgccgcgcccgacggaacaagggcaaaaactgctggcactgctgcgccaggtggagttgctggaagaagagtggctgggcgatgaacaaaccggtagcactccgctgctgcttagtctggcggtcaacgccgacagtctggcgacgtggttgcttcctgcactggctcctgtgttggctgatagccctatccgcctcaacttgcaggtagaagatgaaacccgcactcaggaacgtctgcgccgcggcgaagtggtcggcgcggtgagtattcaacatcaggcgctgccgagttgtcttgtcgataaacttggtgcgctcgactatctgttcgtcagcagtaaaccctttgccgaaaaatatttccctaacggcgtaacgcgtagcgcattactgaaagcgccagtggtcgcgtttgaccatcttgacgatatgcaccaggcctttttgcagcaaaacttcgatctgcctccaggcagcgtgccctgccatatcgttaattctagtgaagcgttcgtacaacttgctcgccagggcaccacctgctgtatgatcccgcacctgcaaatcgagaaagagctggccagcggtgaactgattgacttaacgcctgggctatttcaacgacggatgctctactggcaccgctttgctcctgaaagccgcatgatgcgtaaagtcactgatgcgttactcgattatggtcacaaagtccttcgtcaggattaatccatcaaataatgcctgatagcacatatcaggcgttgtcctcacttctttttgtattccttgaatcacatcacaaaatagacaaatctcaggcggcaaaaaacgacgtctgaatgcattttttttgctggcgacaaacccacgtaaaaagctcaccgtaggcgcaaataccctcattttgattgcgttttacggagcaaataatgtctaacgtgcaggagtggcaacagcttgccaacaaggaattgagccgtcgggagaaaactgtcgacagcctggttcatcaaaccgcggaagggatcgccatcaagccgctgtataccgaagccgatctcgataatctggaggtgacaggtacccttcctggtttgccgccctacgttcgtggcccgcgtgccactatgtataccgcccaaccgtggaccatccgtcagtatgctggttttagtacagcaaaagagtccaacgctttttatcgccgtaacctggccgccgggcaaaaaggtctttccgttgcgtttgaccttgccacccaccgtggctacgactccgataacccgcgcgtggcgggcgacgtcggcaaagcgggcgtcgctatcgacaccgtggaagatatgaaagtcctgttcgaccagatcccgctggataaaatgagcgttagcatgaccatgaatggcgcagtgctaccagtactggcgttttatatcgtcgccgcagaagagcaaggtgttacacctgataaactgaccggcaccattcaaaacgatattctcaaagagtacctctgccgcaacacctatatttacccaccaaaaccgagtatgcgcattatcgccgacatcatcgcctggtgttccggcaacatgccgcgatttaataccatcagtatcagcggttaccacatgggtgaagcgggtgccaactgcgtgcagcaggtagcatttacgctcgctgatgggattgagtacatcaaagcagcaatctctgccggactgaaaattgatgacttcgctcctcgcctgagcttcttcttcggcatcggcatggatctgtttatgaacgtcgccatgttgcgtgcggcacgttatttatggagcgaagcggtcagtggatttggcgcacaggacccgaaaagtctggcgctgcgtacccactgccagaccagtggctggagcctgactgaacaggatccgtataacaacgttatccgcaccaccattgaagcgctggctgcgacgctgggcggtactcagagtctgcataccaacgcctttgacgaagcgcttggtttgcctaccgatttcagtgcacgcattgcccgcaacacccagatcatcatccaggaagaaagtgaactctgccgcaccgtcgatccactggccggatcctattacattgagagcctgaccgatcaaatcgtcaaacaagccagagctattatccaacagatcgacgaagccggtggcatggcgaaagcgatcgaagcaggtctgccaaaacgaatgatcgaagaggccagtgcgcgcgaacagagcctgatcgaccagggcaagcgtgtcatcgttggtgtcaacaagtacaaactggatcacgaagacgaaaccgatgtacttgagatcgacaacgtgatggtgcgtaacgagcaaattgctagcctggaacgcattcgcgccacccgtgatgatgccgccgtaaccgccgcgttgaacgccctgactcacgccgcacagcataacgaaaacctgctggctgccgctgttaatgccgctcgcgttcgcgccaccctgggtgaaatttccgatgcgctggaagtcgctttcgaccgttatctggtgccaagccagtgtgttaccggcgtgattgcgcaaagctatcatcagtctgagaaaagcgcctccgagttcgatgccattgttgcgcaaacggagcagttccttgccgacaatggtcgtcgcccgcgcattctgatcgctaagatgggccaggatggacacgatcgcggcgcgaaagtgatcgccagcgcctattccgatctcggtttcgacgtagatttaagcccgatgttctctacacctgaagagatcgcccgcctggccgtagaaaacgacgttcacgtagtgggcgcatccagtctggctgccggtcataaaacgctgatcccggaactggtcgaagcgctgaaaaaatggggacgcgaagatatctgcgtggtcgcgggtggcgtcattccgccgcaggattacgccttcctgcaagagcgcggcgtggcggcgatttatggtccaggtacacctatgctcgacagtgtgcgcgacgtactgaatctgataagccagcatcatgattaatgaagccacgctggcagaaagtattcgccgcttacgtcagggtgagcgtgccacactcgcccaggccatgacgctggtggaaagccgtcacccgcgtcatcaggcactaagtacgcagctgcttgatgccattatgccgtactgcggtaacaccctgcgactgggcgttaccggcacccccggcgcggggaaaagtacctttcttgaggcctttggcatgttgttgattcgagagggattaaaggtcgcggttattgcggtcgatcccagcagcccggtcactggcggtagcattctcggggataaaacccgcatgaatgacctggcgcgtgccgaagcggcgtttattcgcccggtaccatcctccggtcatctgggcggtgccagtcagcgagcgcgggaattaatgctgttatgcgaagcagcgggttatgacgtagtgattgtcgaaacggttggcgtcgggcagagcgaaacagaagtcgcccgcatggtggactgttttatcagcttgcaaattgccggtggcggcgatgatctgcagggcattaaaaaagggctgatggaagtggctgatctgatcgttatcaacaaagacgatggcgataaccataccaatgtcgccattgcccggcatatgtacgagagtgccctgcatattctgcgacgtaaatacgacgaatggcagccacgggttctgacttgtagcgcactggaaaaacgtggaatcgatgagatctggcacgccatcatcgacttcaaaaccgcgctaactgccagtggtcgtttacaacaagtgcggcaacaacaaagcgtggaatggctgcgtaagcagaccgaagaagaagtactgaatcacctgttcgcgaatgaagatttcgatcgctattaccgccagacgcttttagcggtcaaaaacaatacgctcagtccgcgcaccggcctgcggcagctcagtgaatttatccagacgcaatattttgattaaaggaatttttatgtcttatcagtatgttaacgttgtcactatcaacaaagtggcggtcattgagtttaactatggccgaaaacttaatgccttaagtaaagtctttattgatgatcttatgcaggcgttaagcgatctcaaccggccggaaattcgctgtatcattttgcgcgcaccgagtggatccaaagtcttctccgcaggtcacgatattcacgaactgccgtctggcggtcgcgatccgctctcctatgatgatccattgcgtcaaatcacccgcatgatccaaaaattcccgaaaccgatcattagcatggtggaaggtagtgtttggggtggcgcatttgaaatgatcatgagttccgatctgatcatcgccgccagtaccagtaccttcagtatgacgcctgtaaacctcggcgtcccgtataacctggtcggcattcacaacctgacccgcgacgcgggcttccacattgtcaaagagctgatttttaccgctagcccaatcaccgcccagcgcgcgctggctgtcggcatcctcaaccatgttgtggaagtggaagaactggaagatttcaccttacaaatggcgcaccacatctctgagaaagcgccgttagccattgccgttatcaaagaagagctgcgtgtactgggcgaagcacacaccatgaactccgatgaatttgaacgtattcaggggatgcgccgcgcggtgtatgacagcgaagattaccaggaagggatgaacgctttcctcgaaaaacgtaaacctaatttcgttggtcattaatccctgcgaacgaaggagtaaaaatggaaactcagtggacaaggatgaccgccaatgaagcggcagaaattatccagcataacgacatggtggcatttagcggctttaccccggcgggtagcccgaaagccctacccaccgcgattgcccgcagagctaacgaacagcatgaggccaaaaagccgtatcaaattcgccttctgacgggtgcgagtatcagcgccgccgctgacgatgtactttctgacgccgatgctgtttcctggcgtgcgccatatcaaacaagctccggtttacgtaaaaagatcaatcagggcgcggtgagtttcgttgacctgcatttgagcgaagtggcgcaaatggtcaattacggtttcttcggcgacattgatgttgccgtcattgaagcaagcgcactggcaccggatggtcgagtctggttaaccagcgggatcggtaatgcgccgacctggctgctgcgggcgaagaaagtgatcattgaactcaatcactatcacgatccgcgcgttgcagaactggcggatattgtgattcctggcgcgccaccgcggcgcaatagcgtgagcatcttccatgcaatggatcgcgtcggtacccgctatgtgcaaatcgatccgaaaaagattgtcgccgtcgtggaaaccaacttgcccgacgccggtaatatgctggataagcaaaatcccatgtgccagcagattgccgataacgtggtcacgttcttattgcaggaaatggcgcatgggcgtattccgccggaatttctgccgctgcaaagtggcgtgggcaatatcaataatgcggtaatggcgcgtctgggggaaaacccggtaattcctccgtttatgatgtatagcgaagtgctacaggaaagcgtggtgcatttactggaaaccggcaaaatcagcggggccagcgcctccagcctgacaatcagcgccgattccctgcgcaagatttacgacaatatggattactttgccagccgcattgtgttgcgtccgcaggagatttccaataacccggaaatcatccgtcgtctgggcgtcatcgctctgaacgtcggcctggagtttgatatttacgggcatgccaacagtacacacgtagccggggtcgatctgatgaacggcatcggcggcagcggtgattttgaacgcaacgcgtatctgagcatctttatggccccgagcattgctaaagaaggcaagatcagtaccgtcgtgccaatgtgcagccatgttgatcacagcgaacacagcgtcaaagtgatcatcaccgaacaagggatcgccgatctgcgcggtctttccccgcttcaacgcgcccgcactatcattgataattgtgcacatcctatgtatcgggattatctgcatcgctatctggaaaatgcgcctggcggacatattcaccacgatcttagccacgtcttcgacttacaccgtaatttaattgcaaccggcagcatgctgggttaatgactcgtcccgtcacgatcttcagcaatatgctgaagcatcgtggcggtataacgatgatttctgatactataaagatattcctgcatatacatcggcctgtgcggtgcatcaaaatatttcagcgttgccggattcaccagtcgccaggcaaaatgcgggatcaccgtcagaaaatgtccgcgctccacggcgctgattttggccataaaactgtagggacgataaataatggttggattgatcccacaaggtcgcatattcgcatcaatcattgcttcgaagttggcccggttctgaaagcgcatttgtagccagggcagctcctgaagcagctcttgctcttgtcgctcttcataacggcgagaaacgagaaagcctaatcgcagcggtggtagttcactgatagtcaggttttccagttcctgaactcgtgcagatacatgctgtggggagataataaaatctaactggcggtcaaaaagattatcgataacgccattttcgctgaactcaactggctgggcggtcacgccttcatacttatctccgagactaatcaactgatcgaaaataattgtcggataagtattatctatgccaatcacaatttctcgactacgacgcccactgttatggatttcattatcaatcgcagaaagccgttgataaaccgggaacagtttttgatacagttcctgtccggctttattgaggctgatattattatctttgcgggtaaatagcgtatagccaatttgttcttccagcgcggcaatgcttttaccaaatgggctagccgtcatatggattttttctgccgcccgggcaatattattggtttgcgctaataaaatgaaattgcgcatctttttgctaataaaaatgtccatccccctcccccgcatccttgtccgcttaaccgtttcagtcagcctatccttgatgaaaccgcgagcaaagataggtgattacgtcatggttttacagaaaattacagaaaaaggaggcaatatcgggtaaaggcattagcccgacgaatacgtcgggctacaaatattattgtgctgcaggtgttttagcgggttgttgatccacaggttctaactggaagaccacatcgacctgatcatcaaactgaatagcggcctgctcgtaagtttcctgggcggacaccggcgcggcatcggctttcatcatccgcaccattgggctgggctgatagttggaaacatggtagcgcacgctatataccggccccagtttacgatgaaagccgttcgccagttcctgcgcctgatgaatcgcgttatcaatcgctgccttacgcgctttgtctttataggcatccggctgcgccacgcccaggctcacagaacgaatttcgttaagacccgccttcagcgcgccatccagcaaggaattcagtttgtctaactgacggagcgtgacttccaccgttctcacagcgcggtagcctttaaggatacttttaccatcctgataatcataatctggctgggtgcgtaagttcgcactgctgatatcttttttcgcgatctgattgagttcaaggaaggaaatgtattgtgcgacgcgctcatctgcctgtttcttggcagtagcggcatccttcgcggccacgttaacttcaatcgcaagagtggcaatgtctggcaccgcatccacgcttgccgtaccggaggtgacaatatgcggtccatccggcaattcgttagcctgcgctgccatcccgctaatacccattaatgccgccagggcgataactttgaacttcacgttagtctctccgtgttaattgacttgcccaaaattcaggacctctggaggcaagcttagcgcctctgttttatttttccatcagatagcgcttaactgaacaaggcttgtgcatgagcaataccgtctctcgccagctgcaaggcaataaaccacataacacatcccacaaccagattgataatgcgctgtgcttttgccgtgcgcagacgcggtgccagccaggctgcgagaagagccagaccaaagaaccacaggaaagaggcgctaattgtcccgagtgcaaaccagcgttttggttccacatcaagttgcccgccaaggctgcccagtacaacaaaagtatccaggtaaacatgcggattcagccaggtcactgccaacatggtggcgataattttccatctgccttgcttcatgacttcggcgctggctaactcaatattactgctcattgctgttttaaaagcgccaaaaccataccacagcaagaaggctacgccgccccaggtgaccagcgccagcaaccacgggctctgcatcaataacgcgctgccaccaaaaatcccggcgcaaatcaggaccaaatcgctgatagcacaaagtaaggcaatcataatgtggtactgacgacgtatgccctgattcatcacaaaagcattttgtggaccgagcggtaggatcatagccgccccaagtgcaagaccttgaaagtaataagaaaacacgttggatattccgaattaagtatctgatgcagagactatatcgcgggattgttattagcggaaattgataatattaattggcaatcagaaaaactaataagagagaggccagagagtattatctggcctcagcgttgattacgcagctttgtcttctttcacccgcttaaagttcacatccatttgcgggtacgggaagctgataccggcggcatcaaattcacgtttaatacgctccagcacatcccagtacacgttttgcagatcgccgctgttgctccagacgcggaccacgaaattaatgctgcttgcaccaagttcgttcaggcgcacagtcatttcgcgatctttcaaaatgcgatcttcagactggataatattggtcaggatctgcttaacctgatcgatatcggaatcatacgccacgccaataataaattcgttacggcgaactggctcgcgggagaagttaataatatttccggcaataattttaccgttcggaataacgataattttaccgtctgcagtacgcatggtggtggagaaaatctgcacactcagcacagtaccggctacgccgcccaggtcaacatattctccggcacggaacgggcggaacatgacaagtaacacgccagcggccaggttagacagactcccctgcaaagccagaccaacagctaagcctgcggcaccgagtacagcaatgacactcgcggtttgtacacccacgcgtcccagtgcagcgattagcgtaaaggcgataataccgtaacggactaatgcagaaagaaaatcagcaacagtggcatcgattttacgggagatcatcaggcgattcaccgcgttggaaatcatccgcgcgataatcaaaccaacgatgatgatcgcgagtgccgccacgatgtttactgcataacttagcagcagcgcctggttagctaccagccagcttcccgcgccgtttatgctatcgacaacattcaaatcttccattcaatattccttttcaactgactcaaaatggagaaatacactccgccgccttatgacgggcagtctgacaagggtaaacaataaagcataattttgccaaatagatcacagatttctcatctgaatcaccttgcttttggcgaaaaaatccccgcagagcggggctcagacagatatcaatgtgcgctttgtcatgccggatgcggcgtgaacgccttatccggcctacaaaaacctgcaaattcaatatattgcaggatacgtgtaggcctgataagcgtagcgcatcaggcaattttgcttttggcgaaaaaaagacccgcagagcgggccttgagataagcagaaaggaatatcttacagaacgtcgatcgcgttcagttcctggaatgctttctccagacgagcgatcatgctagtctgaccggcacgcagccatacgcgcggatcgtagtatttcttgttcggctgatcttcgcctttcgggttacccagctgaccctgcagataagcttcgttcgctttgtagtagttcagaacgccttcccaggttgcccattgggtatcggtatcgatgttcatttttactacgccgtagcttacggagtctttgatttcctgagcagtagaaccggaaccaccgtggaatacgaagttcaggctgttgtgcggcaggttgtgtttcttggaaacatattcctgagaatcacgcaggatggtcggagtcagaaccacgttacccggcttgtaaacaccgtgtacgttaccgaaggacgctgcgatggtgaaacgcgggctgattttgctcagttcggtgtatgcgtaatcaacgtcttccggctgggtgtacagtgcagaagcgtccatgtggctgttgtccacgccgtcttcttcaccaccggtgcaacccagttcgatttccagagtcatgccgattttggacatgcgctccaggtatttagagcagatttcgatgttctcttgcagagattcttcagacaggtcgatcatgtgagaagagaacagcggcttaccggtagctgcgaagtgtttttcacccgcgtccaacagaccgtcgatccacggcagcagtttcttcgcgcagtggtcagtgtgcaggataaccggaacaccataatgttcagccatctggtgaacgtgatgcgcaccagagatcgcgcccaggatagcagcaccctgcggaacgtcagatttcacgcctttaccagcgataaaggaagcaccaccgttggagaactgaacgataaccggcgctttaactttagcagcggtttccagtacggcgttgatggagtcagtaccgacgcagtttactgctggcagtgcgaagttgttttcttttgctacctggaaaactttctgtacgtcatcaccagtgattacgccaggttttacgaaatcaaaaatcttagacatgtctcttgtcctgtatcgtcgggccttatactcgtcatacttcaagttgcatgtgctgcgtctgcgttcgctcaccccagtcacttacttatgtaagctcctggggattcactctcttgtcgccttcctgcaactcgaattatttagagtatgaaaaattgcgtgctctaaaagcgcgctgaaacaagggcaggtttccctgccctgtgattttttacttcttagcgcgctcttcgagcatcgctactgcaggcagtactttaccttccacgaattcgaggaatgcgccgccgccagtggagatgtaggagattttgtcagcaatgccgaacaggtcgattgctgccagagtgtcgccgccgccagcgatggagaacgcttcgctgtctgcgatagcgttagccacgatttcagtacctttgcggaagttcgggaattcgaacacgccaaccggaccgttccacagaatggttttcgcattcttcaggatttcagccagttcctgagcggaagcatcaccgatatccaggatctgctcgtcagctttcacatcgttaacagatttcagggtagccggtgcagtttcagagaactcggttgctacgcgaacatcagacggaaccgggatgttgcaggtggtcagcagacgtttagcttcgtcaaccaggtcagcttcgtacagggatttacccacatcgtggccttgtgccgcgataaaggtgttagcgataccaccaccaacaatcagctggtcagcgattttagacagggagtccagaacggtcagtttggtagatactttagaaccaccaacgatagccaccatcgggcgagcaggttctttcagtgctttacccagcgcgtccagttcagctgccagcagcgggcctgcgcacgcaacgtcagcgaatttaccgataccgtgagtagaagcctgcgcgcggtgagcagtaccgaatgcgtccattacgaacacgtcacacagtgcagcgtattttttggacagggtttcgtcgtctttcttctcgcctttgttgaagcgaacgttttccagaacaaccagttcaccttcagcaacgtcaacgccgtcgaggtaatctttaaccagacgaaccgggttagacagtttgtctttcaggtagttaacaaccggcagcagagagaattcttcgttgtactcgccttcggtaggacgacccaggtgggaagttaccatcacttttgcgccttgtttcagggccagttcgatggtcggcagagaagcacggatacgcgcgtcgctggttactttcccgtcttttactggtacgttcagatccgcacggataaatacacgtttcccagcaagatccagatcggtcatcttaattacagacatggtgaatcctctcgttgattctaaaagttttgcagacgctgcttgcgtcttacctgaaagcaacagtagccatagctaacgtcgtgtcgagcattcggttagcaaagccccattcgttatcgcaccagaccaacgttttgatcaggtgtgcgccactgacccgggtttgggtgccatcgacaatggcactgtgcggatcgtggttaaaatctacagagaccaacggcaattccgtatagtcaactataccatgaaatgcaccttgtgctgctttttgcagcaacaggttgacttcattggcttttacaggtttcttcaccgtcacgcttaaatcgattgccgtcacatttatggttggcacacgtaccgcaatcgcttcaaagcgatcgttaaattgcggaaaaaatcgtgtgataccggcggccagtttagtatcgaccggaatgatgctctggctggctgcccgggtgcgacgcaggtcaggatggtatgcatcaataacctgttgatcgtgcatggcggagtgaattgtggtcacagtgccggactcaataccgtacgcatcatctaacaatttgatgacgggaattatgcaattcgtggtacaggaagcgttagaaacgatgcggtgttccgcacgaagttgatcctgattgacgccgtaaacaacggtcgcgtcgagatcgttactgccaggatgactaaagagcacttttttggccccggcggcaatatgcgcttcgccatgctcgcgggagccatatacgccggtgcagtcgaggactacatcaacgccaagttcacgccaggggaggctttgcagactacgttcatgcaatacgcggatggcgtcatcaccaacaaaaagttgatcgcgttcctgtcgtacttcccatgcaaaacggccatggctggtgtcatatttcaacaaatgcgccatgcccgcagcatccgccagttcgttgattgccaccacggtaatttccgcccggcgtccggattcatacaaagcacgaaccacattacgcccgatgcgaccgaagccatttatcgctacgcgtacggtcatagatctcctgcaaggttttccctgagcaaatttgccagacagagtaatccagcaaatcgtccggggaaaccttacctgtcgcaaactgcgactgattggttaattgtcgaacatttaatcgactgaaacgcttcagctaggataagcgaaacgtggaataaaaggaatgtttgtccagccgaagaagacatttatctgactcacatcacacttttatccccttttgtgggaagctttattccaggctggcgtaataataaccctacaataactggaataaattgtcagcttgtgaagtgataccggccttcttcagtcatctctactatcagattggcctgacggctattcatcagcacacgctcgacattggggccatcggtgcgggcataaaatgcttcggctacttgccgcgttaatcctcccgcaattttacgactaatcaagcgctcccgcagaatttgagcaggtgcatgaataaaaatagaaaaatcgcagaaagatgccaactccagccacttttcatcatccagtaacaaccagtttccttcgacgatgacgagtggtgcggtaacgtgcaacgcatcttcaacaggatcatgcttttgtcgatcgtactgcggccacgtacaatccccttccacgacctggcgcagattttccgtcagtttcgcaacgtcaaatgtctctggtgcgcctttgaaggggcgcaattgatgcgcatccagccagctattgtaatggtgaaaaccatccatcgggagcgtctgaatagcgggcagttccgggtcttgttgcgcgagatattcccagaaggtggttagggtacttttacccgtccccggcggagcgcaaagaaaaaccaccgtacgccgctgcggatttaccgtctgtaaggccgccaacatgtgcagcaacggtttatgtacattttcaatctcttcgttctggtactgtgcctgtatcttcagcccattcaccgttaattcaattttcacggcgttaattcctttaaggtggtcgttactgccagcgtcagcgccgttttgaccattccgctaaaacgcgcctcactccagacggagaaatcagcgaacttcatcgcttttaacgcgtcatagagcatcgcattgcgggttatgctattgacgttgctgataaaatcccaggtcatgtcatcggcaaatccgggcgtttcatcctgttcgttcaggtaatgccagaactgggaaaaatgcgtgatatcggcgtacaaccatttatccattttcccaacgcataaatcaaacgcagtgcaacatcaatatcgtcaagcgggccgctttgggcgagtaacggcttcactgcatattccacgatctcttcatcgttatcgacaaacaggctcggcagaaactggcgtatcccctggagcaaaatggtatgcgcagttttcataaaactaaataaattgtcctgtgcatccagttgctcaagcacatcatcttctgtcagcgtcgccattggtcttccgatagatcaccatcaatgcagggagtctattatattacacgtttggtccgcgccgccgatcagtaatgtctgcgtccgcaccccattcgccgtctgttggataccgttcaccagctcaccgcccgtcacgcccgtagcgctaaagaggatatcgttccccctcaccagttcatcgaggctgtacacacggttaacgtcaacgcccattgccttgcaacgcttgcgctcctgctctgcaatctgccgattttccgtgtaatcccctttagcctggcaaaagtcaatcagctcggcctgcatatccccgcctaatgctttaacggcacaggcagaaatcacgccttctggcgcaccgccgatggtgtacatcacatcgtaaggattatcctgccagcaggtcagcacgctggcggcgacatcgccatccggcagggcaaaaaccttcacgcccagctgtgttgcttcctcaatcgcggcactcaggcgcggtttatccagcgtaaccatgcgcagcttatccagcggtttgcctaacgctttcgccacgttgcgcaggttgtccgtcagaggcaaagacagatcaatcgcgcccgccgccagccgattaacaaccagctttttcatatacatatcgggcgcatgtaacaggctatctcgaggggcgaaagccatgaccgccagcgcattgctctgccccatcgccaccatccgcgtgccttcaatgggatcaaccgcgatatcgacttctggcccatcgcctttgcccacctcttcgccaatccacagcatcggcgcatggtcaatttctccttcgccgataaccactcgtccacgaaaagcgacgtcgtttaatgcctggcgcatcgcggtgaccgccaggccatcaattttatttttgtcgccacatccggtttgcggccaggcagccaacgctgcctgttccgtaacgcgaaataatggccacgccagggacatcattgcgcggcctccccgatatcaacgccaaattgtgccagcagatatttctcggcctgttcattccagatgccgtgcgtttcctcaaccagccgcgccaactctttaaacagcggatcggttttgcctttttcggcaaaatcggcaatggcagtgagcggcatggtcacgccgttataaatgagttttttaccgccagggatatccggcagattgagcacggtttctggcaccgcatccaggccaccgatatgggtcaccataaagctcggctgtaactgcccagtggcgctaagggcaatcgcctctttcatgtcgtccgtactaccgccagatgtaccgacgacgtgcgtgctgttgtaatggacgttgtagaaattaaacggcactttgaagtttttatccgtcggcccggcaaagaagttcagacagccatcttccgccagtaattcatcagccatctcaacgacagcaggcaccgccgcataaacaaaaatgtcatcgaacccggcatctcctgtcagcgcccgcagcatctggacaggatcgctcatccctttggtattcacatacaccagctcaatgcctttactggccgccagttccaccggcagcagcttctgtacctgcgccagacgtttgtcgtcgatatcgaccaccaccacccggctcggttgtatgccgccgttaatggcgtaatcgatagcgccaatgcccatcggacctgcacacgccagcagtgcaatattgccgccaggtttgacgcccatgcgatgctcataaacatattgcgtggtgtgataattggcatgataagcaccaataatgcagcacataggctctgccaggctcgccgcagcaaaataagagccgtgatacggtaatacgcagcccaaattaatggcgatttcgggaataatcatataagtggcattgccgccaaaatattcgtagctgtagcccgcactatatccgcttggtaaccccatcgccggttgcaatacaaaacgctggccttttttatatttgccagtgagatttttacccacttcgacaataaccccggcacattcatgcccggtaatgaccggatgattttctaaatcgtcgggtacgcgtttatgttcactaccgagtaacgccgctttccaggtgcttaaacagacgctgtcagaaattacactcaccagtaattcattatcggtaatttctggcagttcaaatacgcgcagacggacatcccgcttgccataaatagcagcaactttggttttcatttttacctctgtaatcagtgtttatgttcggcggttaattgattaaataaagtgtcgagttttggatcgccaatatagttattaatcaatatcagtggtttatccgtcacacgtttcacgcgcccttccagactggcatgagtaacgacgatatccgcatccgcaggcacgttttctatggcgtaatgttttacttcaattgccagccccgctttttccaggcgtttacggaaggtggtcgcgcccatcgcactggagcccatccccgcatcgcaaacaaaggcgatacgcttaaccctgcttaagctgaatgcaccctcttgtttcatcgccttaaccgcattggcactctgagcaaactcatcttcgctctccgtttccaccgttttttccatcttcagtatcaggctagtaatagcaaaggacaccagggtacctaccgtaacaccggcaattgtcgccaggaagctgcctttcggcgtcagtgccaggtaagcaaagatagaccccggacttgggccagccaccagaccaccgtccagtaagttaaacatccaggtgccagacataccgcccgcaatcatggcaataatggtcagcggcttcatcagcacatacgggaaatacagttcgtggatcccaccgaggaagtgaataatcatcgccccgggcgcagaacgtttactcatccctttaccaaacaaggtaaacgccagcagcagccccaggcccggacctgggttagaggccaccataaagaagatggatttaccgttaacgctagcctgttgcattcccagcggataatagacgccctgatcgatcgcattattgaggaaaagcactttcgccggttcattgatgacactcaacaatggcagataacccgcatgtaccagcgcctcaatacactctttgacgaaagtattggcaattaacaccgccgggccgataacttcaaaacccagcagacaaaggagcatccccgcgatacctaaactgaagttattgataaccatctcaaaaccggcaggtatgcgtttttccagtgccttatcgacatattttatgaccaacccaccgagcggccccatgatcatactgccaaggaacatcgggatctctgcgccaacgatcacaccaatagtacctattccgcccatgaccgccccgcgtttaccgccgaccagatgaccacctgtagaaccaatcatcacgggcaataaataggtaatcatcgggccgacaattttggcgaaatgttcgttaggcagccaaccggtgggaataaataacgcagtaataaaaccccaggcaataaaagcaccaatattggggatgaccattgcagtcaaaaagcccccaaaagcctggacctttgcacgagcagacttgttttccataatattatcctgtagaggagagagtaattatccgcggctgataatgtccgctaattgtttttcactacttgctgttaagagttgttcgagtatttcttcttcgcacagtaattcacttaacgcctgaatagcgccaatgtggctatcggcatcggcagcagagagtccgatgagtaatttaattggttcgtcattccccggaaaataaacaccttgttcaagtaatgtcaaagacatcccggttttaagcgccccacattccggtcgcgcatgaggcattgccacgcctggtgcgagaatataataagggccattgttaatggtggaatctttaattgcctgaatgtaattctcgctgatatagtttttatccagcaaacttaccatgctgaaatcgatagcttcctgccaatcttttgcactatgtataacactgatactactttctggaaaataatcactaagccgcataaattatccttattttatttttagggtaccgtccggcggtaaaaataaaatactcgtgcggtttaatgaaagcaattgagcagggaaaccggtgttttgaaaacagtgaattattaatttcttatataacattgagttatagatataacaacaaatgtcaatacgcatatcgtgatgcatattacataattgatatttattgcatataaatatttgtgatctacaacacgccttatctattgcttgtccgcaaacggacatatcaaggtaataaaaaaggtcgccgaagcgacctttttacccgaaatgctaattacagcagttcttttgctttcgcaacaacgttatcaacagtgaagccgaactcttcaaacagcagctctgccggagcagattcaccgaaggtggtcataccgacgatagcaccgttcaggccaacatacttgtaccagtagtcagcaatacccgcttctacagcaacgcgtgcagtaaccgctttcggcagtacggattcacggtaagcagcatcctgcttgtcaaatgcgtcggtagacggcatggacaccacgcgcgctttcacgccttcggcagtcagtttttcgtaggcagcaacagccagttcaacttcactaccggtagcgatgaaaatcagttccggctgaccggcgcagtctttcagcacataaccaccgcgcgcgatgtttgccagttgctcttcagttcgttcctgctgcgccaggttctgacgggagaggatcagtgcggtcgggccgtcctgacgctcaacaccgtatttccacgcgaccgcggattcaacctggtcacacggacgccatgtagacatgttcggggttacgcgcagagaagcgacctgctcaaccggctggtgagtcgggccgtcttcgcccagaccgatggagtcgtgggtgtaaaccatcacctgacgctgtctcatcagcgcagccatacgtacggcgttacgtgcgtattccacgaacatcaggaaggtggaggtgtacggcaggaagccaccgtgcagggagataccgttagcaatcgcggtcataccgaactcgcgaacaccgtagtggatgtagttacccgcagcatcttcgttgattgctttagaaccagaccacagggtcaggttagacggcgccaggtcagcagaaccgccgaggaattccggcaacagcggaccgaacgcttcgatagcattctgagacgctttacggctggcgattttcgccggattagcctgcagtttagcgatgaactctttcgctttagcgtcgaagtcagacggcatttcgcctttcatacggcgggtaaattcagcggcttcctgcggataagctttcgcgtaagcagcgaatttctcgttccatgcggattctttcgcctggcctgcttctttcgcatcccactgagcatagatttcagacgggatttcgaacggcgcatatttccagcccagttgttcgcgggtcagggcaatttcagcgtcgcccagcggcgcaccgtgggagtcgtgggtaccggctttgttcggggaaccgaaaccgatgatggttttgcacatcagcagggaaggtttgtcagtcactgcgcgcgcttcttctactgcgcgtttgatagatgccgcgtcatgaccgtcgatgtcgcgaataacgtgccagccgtaagcttcgaaacgcattgcggtgtcgtcggtgaaccagccttcaacgtgaccatcgatagaaataccgttgtcatcgtagaatgcaatcagtttacccagcttcagcgtacccgccagagagcaaacttcgtgggagatgccttccatcatgcagccgtcgcccatgaaggcgtaggtgtagtggtcgacaatgtcgtggcccggacggttaaactgcgccgccagcgttttttctgcaatcgccataccgactgcgttggcaataccctgacccagcggaccggtggtggtttccacaccagcggtgtaacccacttccgggtgacccggagttttagagtgcagctgacggaagtttttcagttcttccatcggcagatcgtaaccggtgaggtgcagcaggctgtagatcagcatggagccgtggccgttggacagcacgaagcggtcacggtcagcccaggacggattctgcgggttgtgtttcaggaaatcacgccacaggacttcggcaatgtcagccatacccataggggcacccgggtgaccggatttggctttctgtactgcgtccatgctcagcgcacgaatagcattggcaagctctttacgactggacattttgactccagatcggatgatgaagggcacgcccttaacgacttgacgacagcgcgttttgggctacgccggaaaatttgccaacaatttaccacaagccgcgcgtcatgtacatggaacatccttttgccgcttcagaaatctctggatcatgctcgcatgttgcgcaatctactcgcccgtccgctgcgcttttccttatactgagactgagcgtcgattcacctgcaaacggcgcatttttagaataatcctgaccttgtgcggaagagaaaacatgaaaattcgcgccttattggtagcaatgagcgtggcaacggtactgactggttgccagaatatggactccaacggactgctcagtagtggagcggaagcttttcaggcttacagtttgagtgatgcgcaggtgaaaaccctgagcgatcaggcatgtcaggagatggacagcaaggcgacgattgcgccagccaatagcgaatacgctaaacgtctgacaactattgccaatgcgctaggcaacaatatcaacggtcagccggtaaattacaaagtgtatatggcgaaggatgtgaacgcctttgcaatggctaacggctgtatccgcgtctatagcgggctgatggatatgatgacggataacgaagtcgaagcggtgatcggtcacgaaatggggcacgtggcgttaggccatgtgaaaaaaggaatgcaggtggcacttggtacaaatgccgtgcgagtagctgcggcctctgcgggcgggattgtcggaagtttatctcaaagtcaacttggtaatctgggcgagaaattagtcaatagccaattctcccagcgccaggaagcagaagccgatgattattcttacgatcttctgcgccaacgcggcatcagcccggcaggtcttgccaccagctttgaaaaactggcaaaactggaagaaggtcgccaaagcagtatgtttgacgaccatcctgcatccgccgaacgcgcccagcatattcgcgatcgcatgagcgcggatgggattaagtaaagcctggtggtgtcgaacgtaggtcagataaggcgttcacgccgcatctgacatgaatggcacatttgttaccttgtgcgcattgccggatgcgatgctggcgcatcttatccggcctacgggtgccgaacgtaggtcggataaggcgttcacgccgcatccgacattaatggcacgttttacccgtgcgcatcgcatctggtgcttactcgccctttttcgccgcctgaatatacagcatttccagcgccagcgttgccgctgccagagcagtgatttcgctctgatcgtatgccggagccacttccactacgtccatcccaacaatgttgagatctttcaggccgcgtaccagtttaatagcgcgatcggaggtcaggccgccaatcactggcgtaccggtgcctggtgcaaaagcaggatccaggcagtcgatatcaaaagtcaggtaaaccggcatatcacccacaatctgtttcacttgggcgataacgtcatccacgctgcgatcgttcacctggcaggcgtccagcacggtaaagccgttgtctttatcaaactcggtacgaataccaatctgcacggaatgattcgggtcgatcagaccttctttcggcgcggtatagaacatagtgccgtggtcaaattcacaaccgttcgcataggtatcggtgtgggcgtcaaagtgtaccagcgccattttgccgaaatgcttcgcatgagcacgcagcagcggcagcgtaacaaagtggtcaccaccgaaagagagcatacgcttaccggcagccagcagcttctcggcgtgcgcctgcagcttttcgctcatctcacgggcatcgccaaaggcatataccagatcgccgcagtccacgacgttcagacgctcacgcatgtcgaaattccacgggaagcggttgtgttcccaggccagattcgtgctaacctgacggatcgctgccggaccgtggcgaccacccgcacgaccagaagtggccatatcgaacggcacgccagtaatcacccagtctgcatcgctgtcatacggctggaagttcatcggcaggcgtaaaaaaccaaaggcattggaaaccagactgttatcgtattgatgacctaaggtgctcatggatggactcctattacaaagtcgatataaaaaaacccttccgcgtcgttaggcccgacgaggaagggttggatttgtcacaataaattgtggcggattatcaccgctaaattaagcggattcaagtaacacaggacttactcatcttcaagataagtataaccgtacaaacctgcctcgaactcttcaaggaactgttgttgcagttcagcatcaagatcggttttcttcacttgatcgcggaactgggttaacagcgttttcggatcgagctgtacatattgcagcatgtccgccacggtatcgccttcgtcagacagttctacttctacgctaccgtcagggaagacgaacacgtcaaccgcttcggtatcaccgaacaggttgtgcatgttgccgaggatctcctgatatgcgccgaccataaagaaaccgagcatcggcggattctctggatcgtactccggcattggcattgtcgtggcaataccgtcaccatcaatatagtggtcgatagcaccgtcagagtcacaggtaatatccagcagcacagcgcgacgttccggcacttgatccagcccttccagcggcagaaccgggaacaactggtcgatcccccatgcgtccggcatgctctggaacaggctgaagttgacgtacattttgtccgccatacgttcctgcagctcgtcgataatcggacgatgagcacggttttgcggatccagctgcttttgcacttcatggcacatgctcaaataaagctgctcagcccatgcacgttcttgcaggctaaagatgccggaagagtagccgatatgaatgtcgtgcagatccatctgactgtcgtgtaaccattcacgcagagaacggcgagttcccggttcgtgcatctcctgccaggtttcccacatgctttgcagcgcgcgcggcgcatcttctgcaggcgcggtcggcaccgtgtattcgttacgttccacgccgatgatattagacaccagcacggtgtgatgcgcagtcaccgcacgaccgctttcggtgattaccgtcggatgcggcagaccgttttcttcacacgcatcgccaatcgcccagataatgttgttggcgtattcattgaggccgtagttcacgctacagtcggactggctacgagtaccttcataatccacgcccagaccgccgccgacgtcgaagcactgaatattgacgcccagcttgtgcagttccacatagaaacgcgcggattcacgaacgcctgtcgcgatatcgcgaatattcgccatctggctaccgaggtggaagtgcagtagttgcaggctgtcgagacgcccggcttcacgcagggtttcaaccagttgcagtacctgagtcgcagccaggccgaacttgcttttttccccgccggaggactgccatttaccgctaccctggctagccagacgtgcacgcacgcccagacgaggaacgacattcagacgttctgcttcatccagcacaatggcgatttcactcatcttctcaatgaccagatagaccttgtgccccatcttctcgccaattaatgccaggcggatatattcgcggtctttataaccgttgcagacgatgacgctacgggtcatgccagcatgtgccagtactgccatcaactcggctttggaaccggcttccagacccagcggttcgccgctatgaatcagggactcaatcacgcggcggtgctggttaactttgatcggataaacaaggaagtaatcgccgttatagccgtaggattccctcgcacgtttgaacgcggcgttaatggaacgcaaacggtgctgcaggatctgtgggaaacagaacagtgcaggcagacgctggccctgtgcttcacgagttttcactaactgcgcgagatcgacgcgagcttccgggacgtccgggtccgggcacacgctaatgtggcccagctcgttaacgtcatagtagttattgccccaccaggcaatattgtaagtacgcagcatcttgctggcttcctgggagctcattgcaacctcctgcatggagcgtagtacaccgtgttcgcccgcactgctaggcaaacccatagacatgtcgtcagacatagcgaacctcaaattattttattaagtgtaaaacagttaacgactatcgcagcctggaactggcttaacaacccataagcacatggattttccagcagactatgctgacgctccaactgcgcaaccggtttctttttcataacattattaagcacataaccgaacgtaagtgtgaaagttcggcgaaaccacgagaaaactcttgtttttacaagagcgcccttgttcagtcctcagtaactgtaaccagctcttgaatcctgagaagcgccgagatgggtatagcaagcgcaggtatgcaaagcagagatgcagagtgcggggaacgaatcttcaccagaacggtgagacaggttaagcagcagacaacggttcattatttcgtaagtcctccacggccgcctgttaagacgaacccacaagccaaaactctgattagtacccggctggaagtggcaacacgaaagaaacgtcgtgtgctttttatttaagccgcgcgccgcgttttataccccacaatggcagaaaattgcaaaagataaatacgcagaatgccggcattgtcaggaaaaatttccagccacgtttttaacagaatgagacagctttcaaaaaaaagtggaaatagggtgaagaattgacctaaaatagccatccagatgttaatccatccataccgattaacactcagactgccagtgtttttaacctgcagagtcgtggtaggatccgctaccacagaaaatccacacaacagtttgagctaaccaaattctctttaggtgatattaaatatggcaaaacacctttttacgtccgagtccgtctctgaagggcatcctgacaaaattgctgaccaaatttctgatgccgttttagacgcgatcctcgaacaggatccgaaagcacgcgttgcttgcgaaacctacgtaaaaaccggcatggttttagttggcggcgaaatcaccaccagcgcctgggtagacatcgaagagatcacccgtaacaccgttcgcgaaattggctatgtgcattccgacatgggctttgacgctaactcctgtgcggttctgagcgctatcggcaaacagtctcctgacatcaaccagggcgttgaccgtgccgatccgctggaacagggcgcgggtgaccagggtctgatgtttggctacgcaactaatgaaaccgacgtgctgatgccagcacctatcacctatgcacaccgtctggtacagcgtcaggctgaagtgcgtaaaaacggcactctgccgtggctgcgcccggacgcgaaaagccaggtgacttttcagtatgacgacggcaaaatcgttggtatcgatgctgtcgtgctttccactcagcactctgaagagatcgaccagaaaagcctgcaagaagcggtaatggaagagatcatcaagccaattctgcccgctgaatggctgacttctgccaccaaattcttcatcaacccgaccggtcgtttcgttatcggtggcccaatgggtgactgcggtctgactggtcgtaaaattatcgttgatacctacggcggcatggcgcgtcacggtggcggtgcattctctggtaaagatccaagtaaagtggaccgttccgcagcctacgcagcacgttatgtcgcgaaaaacatcgttgctgctggcctggccgatcgttgtgaaattcaggtttcctacgcaatcggcgtggctgaaccgacctccatcatggtagaaactttcggtactgagaaagtgccttctgaacaactgaccctgctggtacgtgagttcttcgacctgcgcccatacggtctgattcagatgctggatctgctgcacccgatctacaaagaaaccgcagcatacggtcactttggtcgtgaacatttcccgtgggaaaaaaccgacaaagcgcagctgctgcgcgatgctgccggtctgaagtaatctttcttcacctgcgttcaaaggccagcctcgcgctggcctttttcttttggataggcgttcacgccgcatccggcaaaaaaaccgcccgcacaataacatcattcttcctgatcacgtttcaccgcagattatcatcacaactgaaaccgattacaccaaccacaacagacaaagatttgtaatattttcatattattattcggttttcacagttgttacatttcttttcagtaaagtcttaattgcagataacagcgtttaatctatgatgatataactcaattattttcatgcacttaaatcataactaagataaatgttagtgtaagcgattacactgatgtgatttgcttcacatctttttacgtcgtactcacctatcttaattcacaataaaaaataaccatattggagggcatcatgcctgacgctaaaaaacaggggcggagtaacaaggcaatgacgtttttcgtctgcttccttgccgctctggcgggattactctttggcctggatatcggtgtaattgctggcgcactgccgtttattgcagatgaattccagattactagccacacgcaagaatgggtcgtaagctccatgatgttcggtgcggcagtcggtgcggtgggcagcggctggctctcctttaaactcgggcgcaaaaagagcctgatgatcggcgcaattttgtttgttgccggtagcctgttctctgcggctgcgccaaacgttgaagtactgattctttcccgcgttctactggggctggcggtgggtgtggcctcttataccgcaccgctgtacctctctgaaattgcgccggaaaaaattcgtggcagtatgatcagcatgtatcagttgatgatcactatcgggatcctcggtgcttatctttctgataccgccttcagctacaccggtgcatggcgctggatgctgggtgtgattatcatcccggcaattttgctgctgattggtgtcttcttcctgccagacagcccacgttggtttgccgccaaacgccgttttgttgatgccgaacgcgtgctgctacgcctgcgtgacaccagcgcggaagcgaaacgcgaactggatgaaatccgtgaaagtttgcaggttaaacagagtggctgggcgctgtttaaagagaacagcaacttccgccgcgcggtgttccttggcgtactgttgcaggtaatgcagcaattcaccgggatgaacgtcatcatgtattacgcgccgaaaatcttcgaactggcgggttataccaacactaccgagcaaatgtgggggaccgtgattgtcggcctgaccaacgtacttgccacctttatcgcaatcggccttgttgaccgctggggacgtaaaccaacgctaacgctgggcttcctggtgatggctgctggcatgggcgtactcggtacaatgatgcatatcggtattcactctccgagcgcgcagtatttcgccatcgccatgctgctgatgtttattgtcggttttgccatgagtgccggtccgctgatttgggtactgtgctccgaaattcagccgctgaaaggccgcgattttggcatcacctgctccactgccaccaactggattgccaacatgatcgttggcgcaacgttcctgaccatgctcaacacgctgggtaacgccaacaccttctgggtgtatgcggctctgaacgtactgtttatcctgctgacattgtggctggtaccggaaaccaaacacgttagcctggaacatattgaacgtaatctgatgaaaggtcgtaaactgcgcgaaataggcgctcacgattaatctccccaagcttcctcccatcgcggaggaagccacctcttgcagtcatcttttcttcgctctatcctctgccgctatgaaaacatcccgtctccctatcgccatccaacaggccgttatgcgtcgcctgcgggaaaaactcgcccaggccaacctgaagctagggcgtaactacccggagccaaaactctcttacacccagcgcggaacctccgccggaacggcctggctggaaagctatgaaattcgcctcaatcccgttttgctgttggaaaacagtgaagcttttattgaagaagtggtaccgcacgaactggcacatttgctggtatggaaacatttcggccgcgtagcgccacatggcaaagagtggaagtggatgatggaaaacgtgctgggtgttcccgcccgtcgtacgcatcagttcgaactgcaatccgtgcgtcgcaacaccttcccctaccgctgcaagtgccaggagcatcagcttaccgtacgccgccataatcgcgtagttcgtggcgaggccgtctatcgctgtgttcactgcggtgaacagctggttgcgaaataaccatctgaactatcaggaactttcctgatttggctgattgcataccaaaacagctttcgctacgttgctggctcgttttaacacggagaagtgcctacactagcgggattctttttgttaacccctaccccacgcgtacaaccgcgtggggagacgacgcggatttttaactatgcgtatcccccgcatttatcatcctgaaccactgaccagccattctcacatcgcgctttgcgaagatgccgccaaccatatcgggcgcgtactgcgcatggggccggggcaggcgttgcaattgtttgacggtagcaaccaggtctttgacgccgaaattaccagcgccggcaaaaaaagcgtggaagtgaaggtgctggaaggccagatcgacgatcgcgaatctccgctgcatattcacctcggtcaggtgatgagccgtggtgaaaaaatggaatttactatccagaaaagcatcgaactcggtgtaagcctcattacgccacttttttctgagcgctgcggcgttaaactggatagtgaacgtctgaacaagaagcttcagcagtggcagaagattgcaattgctgcctgtgagcagtgtggtcgtaaccgggtgccggaaatccgtccagcgatggatctggaagcctggtgtgcagagcaggatgaaggactgaaactgaatcttcacccgcgcgccagtaacagcatcaatacgttgccgttaccggttgaacgcgtccgcctgctgattggcccggaaggcggtttaagcgcagatgaaattgccatgactgcccgctatcaatttactgatatcctgttgggacctcgcgttttgcgtacagagacaactgcgctcaccgccattaccgcgctacaagtacgatttggcgatttgggctaacggagaagaataatgatcaagctcggcatcgtgatggaccccatcgcaaacatcaacatcaagaaagattccagttttgctatgttgctggaagcacagcgtcgtggttacgaacttcactatatggagatgggcgatctgtatctgatcaatggtgaagcccgcgcccatacccgcacgctgaacgtgaagcagaactacgaagagtggtttagcttcgtcggtgaacaggatctgccgctggccgatctcgatgtgatcctgatgcgtaaagacccgccgtttgataccgagtttatctacgcgacctatattctggaacgtgccgaagagaaagggacgctgatcgttaacaagccgcagagcctgcgcgactgtaacgagaaactgtttaccgcctggttctctgacttaacgccagaaacgctggttacgcgcaataaagcgcagctaaaagcgttctgggagaaacacagcgacatcattcttaagccgctggacggtatgggcggcgcgagcattttccgcgtgaaagaaggcgatccaaacctcggcgtgattgccgaaaccctgactgagcatggcactcgctactgcatggcgcaaaattacctgccagccattaaagatggcgacaaacgcgtgctggtggtggatggcgagccggtaccgtactgcctggcgcgtattccgcaggggggcgaaacccgtggcaatctggctgccggtggtcgcggtgaacctcgtccgctgacggaaagtgactggaaaatcgcccgtcagatcgggccgacgctgaaagaaaaagggctgatttttgttggtctggatatcatcggcgaccgtctgactgaaattaacgtcaccagcccaacctgtattcgtgagattgaagcagagtttccggtgagcatcaccggaatgttaatggatgccatcgaagcacgtttacagcagcagtaacccaccttagcgagaaggatctcgttgagactctgagtgacagcgcccttctttccacgcatactgggcgctgttgcttttttgaaccaggaaacagaacctctgacaatgaatttacagcatcactttcttattgccatgcctgctctccaggatccgattttccgtcgttccgtggtctacatttgcgaacataataccaatggtgcaatggggatcatcgtcaacaagccgctggaaaatctcaaaattgaagggattctggaaaagctgaagatcacgccggagccgcgtgatgaaagtatccgtctggataaaccggttatgctcggcggtccgctggctgaagatcgcgggtttattttgcatactccgccctccaattttgcttccagcattcgcattagtgacaacacggtaatgaccacttcccgcgatgtgctggaaacgctcggcaccgataaacaaccgtctgacgtattggtggctctgggttatgcctcctgggagaaaggtcaactggaacaagaaattctcgataacgcgtggctaacggccccggcagatctgaatattctgttcaaaacgccgattgccgaccgctggcgcgaggcggcaaaactgattggtgtggatattctcaccatgcctggtgtggcaggacacgcctgatgagtggaaccttactcgccttcgacttcggcaccaaaagcattggcgtagcggtcggccaacgcattaccggcaccgctcgccctttgcctgcaattaaagcacaggacggtacgccggactggaacattatcgagcgtttactgaaagagtggcagccggacgaaatcatcgtcggtttgccgctgaatatggacggcaccgagcaaccattgactgccagagcgcgtaaatttgccaaccgtattcatggccgtttcggtgttgaagtaaagctccatgacgagcgtcttagcactgtggaagcccgttccggtctgtttgaacagggcggctatcgggcgctcaacaaaggcaaagttgactctgcctctgcggttattattctcgaaagctatttcgagcagggatattaaggcgatttaaacgcctggcggagtgtaaataatatcatcgcgtcttattgccggatgcggcgtgaacaccttatccagcacacatctggcagcggctataggtctgataagacgcgttagcgtcgcatcagacatttattgcctttgtaggcccgataagcttgcgcatcgggcatggcaacgtcacaaacgcccttcccccacccggtgctgataactctgctgaaacgttatcatccccacctgctgcccggtttgaataacatgcggtaactggtgggttttcccttcgcgaatcaaattccccaccgcgggtgtgttaatcagcaattcaaatagcgccacgcgtccttcctgtttatccacttccagcttttgactcagcactgcccgtaaactacctgccagttgattacgcacggggtctttttcctgcgccggaaaactatccaccagtcgctcaactgcctgcgcggcaccacgcgtatgtaatgttgccagcaccaaatgcccggtttctgccgccgtcagtgccagacggattgtctcgctgtcacgcagctctccgagcaaaatcacatcaggatcttcccgcaatgcggcccgcaatccgcttgcgaacgtcatacagtgcaaaccaatttcccgctgctggatcaaacatcgctggctggcatagagatattcaacaggatcttccagcgtcagaatatgcgcatcggcatgttgattgagatagccaaccatcgccgccagcgtggtagatttgccactccccgtcgcccccgtcaccagaatcaggccattctcgctcttgagtaattccggcaataccgttggtgcgccaagctgttcgagctgcgggcagtggctaggtaacagccgtaacgccaggctaatgccatgccgttgcgcgaatgcgctgccacgcaatcgctggttttccgccaggctcacggcaaaatccagctgaccattctccagcaatattgcccgctgatcgtcatccagccactcccgcagtagctcttcgacgtccggcgtatcaaacggcgcagcttccattctgccgcgaatgcgccatcgtgcgggccaggcgctgcacaggtgtagatcgctgacgttatgctttacactaagggccacaatttcttccatattcatactaagatcctcggaaaatgaacgatattgcgcataacctggcacaggtccgggacaaaatcagtgcggctgcaacgcgttgcggccgttctccagaagaaattacgctgcttgcagtcagtaaaacaaaacctgcgagcgccatcgcagaagccattgatgccgggcagcgtcaatttggtgaaaactacgttcaggaaggggtagataaaattcgccactttcaggaactgggcgtaacaggattagaatggcattttattggcccgttgcagtctaataaaagccgcctggtggcagagcatttcgactggtgtcataccatcgaccgtttgcgcatcgctacccgtctcaacgaccagcgcccggcagaacttccccctcttaacgttctgattcaaattaacattagtgatgaaaacagtaagtccgggattcaactggctgaactggacgagctggcagctgcggtcgctgaactaccgcgtttacgtctgcgcgggttgatggcaatccctgcgcctgagagtgaatatgtaaggcagtttgaagttgcacgccaaatggctgtagcatttgccggactgaaaacgcgctacccgcatatcgacacgctctctctgggaatgagcgacgatatggaagccgccattgcggcaggtagcacgatggttcgtatcggcactgcaatttttggtgcgcgtgattactctaaaaaataaggaattaaaggaacgccatgaatacgttgactttcctgcttagtacggtcattgagctgtataccatggtgctgttattacgcatctggatgcagtgggctcattgtgatttttacaaccccttcagtcagtttgtagtgaaggtaacgcagccaattatcgggccactgcgccgcgttattccggcaatggggccaattgacagcgccagcctgctggttgcctatattctcagttttatcaaagccatcgtgctgtttaaagtggtgaccttcctgccaatcatctggattgccggtttactgattctgctgaaaaccatcggcctgctgattttctgggtcctgctggtgatggcgattatgagctgggtaagccaggggcgtagcccgattgaatacgtgctgattcagctggccgatccgctgctgcgcccgattcgccgcctgctaccggcaatgggtgggattgatttcagcccgatgatcctcgttctgctgctgtatgtcatcaatatgggtgtcgcagaagtattacaggcaaccggaaatatgctgctgccagggctgtggatggcgttatgaatgccgtaacagttaatgatgacggtctggttttacggctctatattcagccgaaagccagccgtgattctattgtcggtttacatggcgacgaagttaaagtcgccattaccgcgccgccggttgacggccaggccaacagtcatctggtgaagtttctcggtaagcaattccgggttgccaaaagccaggtggtgattgaaaaaggcgaacttggccgccacaaacaaattaaaatcattaatccgcaacaaatcccgccagaaatcgcggcgttaattaattaagtatcctatgcaaaaagttgtcctcgcaaccggcaatgtcggtaaagtgcgtgagctggcgagcctgcttagcgacttcggtcttgatatcgtggcccaaacagacctcggcgttgattccgctgaagaaaccggcctgacctttatcgaaaacgcgattctgaaagcgcgccatgcggcaaaagtgaccgctttaccggcaattgccgacgactctggtctggcggtagatgtgcttggcggcgcgccgggcatttactccgcgcgttattccggtgaagacgcgaccgatcaaaagaatctgcaaaaactgctggaaacaatgaaagacgtaccggacgaccaacgtcaggcgcgtttccactgcgtgctggtatatctgcgtcacgcggaagatcccactccgctggtatgccacggtagctggccgggcgtgattactcgtgaaccagcgggcactggtggctttggttatgatccaatcttcttcgtaccttccgaagggaaaaccgccgccgaactgacccgcgaagaaaagagcgccatttcccaccgtggtcaggcgttgaaactgctgctggacgctttacgtaatggttaaattacctccgctgagtctctacattcacatcccgtggtgcgtgcagaaatgcccgtactgcgatttcaactctcacgcgttgaaaggagaagtgccgcacgacgattatgttcagcatctgcttaacgatctggacaacgatgtggcttacgctcagggccgtgaagtaaagacaatctttattggcggtggtacgccgagcctgctttccggcccggcgatgcaaacgctgctggacggcgtgcgtgcgcgtttgccgctggcagcggatgcagaaattactatggaagcgaaccctggcacggtagaagccgatcgctttgtcgattatcagcgtgctggtgtgaaccgcatctctattggtgtgcagagttttagcgaagaaaagctgaaacgacttgggcgtattcatggcccgcaagaagcgaaacgcgcggcgaagctggcgagcggtttagggttacgtagctttaaccttgatttgatgcatgggctgccggatcaaagtctggaagaggcgcttggcgatctacgccaggccattgaactgaatccgccgcatctttcctggtatcaactgaccatcgaacccaatacgctgtttggtagccgaccaccggtgctgccggacgatgacgcgttgtgggatatattcgaacaggggcatcagttattaaccgcagcgggttatcagcaatatgaaacttccgcttacgccaaacccggttatcagtgccagcacaatctcaactactggcgctttggtgactacatcggtattggctgcggcgcacacggcaaagtgaccttcccggatgggcgcattctgcgtaccaccaaaacgcgtcatccgcgtggttttatgcaaggaaggtatctggaaagccagcgtgatgtcgaagccacagataagccgtttgagttctttatgaatcgcttccgtctgctggaggccgcgccgcgcgtggagtttattgcgtataccgggctttgcgaagatgtgattcgcccacagttagacgaggcgattgcccagggttatctcaccgaatgtgcggattactggcagataacggaacatgggaagctgtttttaaatagcctgctggagctttttctggctgagtaaacttgtattgccggatgcggcgtgaacgccttatccagccgacatgtggcagcggttgtaggtctgataagacgcgcaagcgtcgcatcagacgttgattgccggatgcggggtcaacgccgcatcctgctacaaatcgtgcactatatcaaacttacttaatcaccccattgcgccgcagttgttcggtatcttttttccagcgttcattagcttggttgatatcgtcaattttcatcaaaatcgcgacttttttactgtttatttcactaactttcatcgttaacggatattgccctttttcgagcgttacccagtcatcctgcaatttacggctaagtttttgactttgcagaaaagtctgtcgccgttgttcgttgatatcgaaatctcgtttctgctgaatcggcacttcataacactcttcactctgtttatgacatgccgcaatcgccggttgataaacctctttgtcatatttaaccgcgaacgcctcgctatcgttctgtttattaaactcatcacgctgttggtgaatttttttaaaggcgtcttcgcgggtcatttgcttaccgtttgcatcttttccccaatatgcatccgctgctttctgcgccgccaccatttgcttatcaagcgctttcacttccttttccagcgcaggaatgctgttcttctgggtattcaacgcagattcaagctgactaaagcgataattgaaatcttcgctattcacgatcagatatttattattcgttttgatatcgtcgaccacccgcccacgatcgctggctgccgcctgaaaagagtaaaagttcacgctccagccagacgcgggcgttcctttactggttaacatcgcgctgaattttaccggtttatctttcgtccaggtctgttcgagcagttcgtaatctgccaactgaccgacccaggtatagagatcgtcactggaagagacatcgccttccgcactccaggtggcctgattacccttagcatcaagattttttaaggtgatagcatcaagcttgagaatgccgtgatactgctttttgaattgatcttttaagatattttcagttggcggttcgccatctgcccaggcattaccagtcatcaacataagcagtgccgtgccaacaatccattgctttttcacccgaaaaacctcacgcggaataatttattccggtgattatcattagggtaattaaaattggcaatggacgtgagtctgaagtgaaaaagccccggcacgataccggggcgaggcgattagtactgattgaagatctgctggatctgctgcggatctttggtttgcgtcagagccagttgcagcagaacgcgcgctttttgcgggttcagcgtgccagaggcgacgaagccgtatttcgcatcatccacttcggcatcctgagtggtagcgcccgtcggtacgcgggaagaacgcacgactgcagtaccggttttcgcggcggtcgccagcgtgtcgaacacagatttatacaggttgccgttacccacaccagcgctaacgatgccatcatagcccgcatctaccagtgctttagccggaagatcggatgcgttagcgtagttataaacaatgccgactttcggcagttcattcagcttagagacatcgaatggcgtgtcgctggtatgcttacgtgccggggtacgctggtagtcaatcttaccgttgtgaatgtaacccagaggaccgtagttaacagacttgaaggtcgctacgtcggtggtgttggttttggtgacgtcacggccatcaagcacggtgtcattcatcactaccagcacgccacggttggcggaggctttatcagctgcggtcactaccgcgttatacaggttgaatggaccgtctgcgctcatagacgtggacggacgcattgcgccgaccatcaccaccggtttgtcgcatttcaccgtcaggtcgaggaagtaagcagtttcttccatcgtgtcggtaccgtgggtaatgacgaagccgtcggtcttatcgcagtcggtgttaatttttttcgccagtgtcagccagacattatcgttcatgtcctgggagccgatattcactacctgctcgcctttaacgttcgcaatgtcttttagttgcggcaccgcattaaccagattttctacgccaactttacccactgtgtagttagatttggttgcggagtcaccaccaccggcaatggtcccgccggttgctaaaatggtgatattgggtaatgccaatgctgcaccactaaaacccataaccagtgcggcaagtgccgtctttttgaaaaactccatttcattcctccagttacgtgaacgctacgcattatcccttagctctgtatgggaaatttgacgttaaacaatttacaacgtgaatatattttggagatctacaaagttagaggcaggtaacaaaacgaagaattaaacggcataaaaaagtattatgccgtcttaaaatagaggattattttaaattcccgaccagggctttgcggctatcttccagagtcacaacgcggctacaaacatctttgccaaactgctggaaatctttttcctgctttttccactcggtttggatactggattgcagcccccccaggcttcccagcacattctgtaatgggttaccgccgctttttcagcaccgctttcgcgcccatttcattaatgctgtcctgtaaaattccacccattgcctgattcactaattgctggccttcggcgcgaacctgatcaatggctttatagtgaaacgtcaggccatcgctgcgcgtttcaataatgcggttcatctgctctttcagctgcgcatcaagtttggtcagacggctgcgcattttgctgctttcgcccatctcctgaacgataattttatccagagcaatacgggctttctcgacgcggcttttcgcgccttcatcaatccacggcagcgtgctgcgtagttcagcctgataatccttcgcctgctcgcgctgggcggcattcagggaatattgcttaccgttatacatcacgttgccgtctggcgtgatcaccagattgccgttttcgcccttcacctgcacggtttgcgggctgacaatcacatcgtcacgcggcgtgacgctgcactggtagtcggcgtgagcggtcattgccgtcacactaagtgctgccgccagcagcattttgcgcatcatagtcttccctcaagaaaaaatcaggccagcatttgctggccccagattgataacaaagtacgcgttttccatgccggatgcggcgtaaacaccttatcccgcctactcgatcgtgcatctttccaggcctgataagcgtagcgcatcaggcagttttgcatttgtcatcgcccgtatgctttcttagtcccaccaaacgtcgaaaagttcgctggtgcgtacctcatccagtttgcgctcttccagccacttacgcacaatcgcctgatgttcttcggtgcatttgccgatttcctgcatgcagatcagaccttcccaggccagataaccgctgccgtcaaaggccagtttgttcggttcgataacctcgttaataaaatcatcaacggttttatcaatctgttcttcgcttgtaccttccgggaatcgccatgccacgctaaatcctaattcctggaattcgtcgatgtgcatttttttacgcagacgacggctacggttctttgccattatttcaccctctcgaacattaagtcccatactccgtgaccaagacgatgaccacgttgttcaaatttcgtcaccggacgacttgccggacgcggtacgtaatcattgctctcactcaggtttttataaccgtcaatagaagacatcacttcaagcatatgttccgcataaggttcccagtcggtcgccatatggaatacgccccccagctgcagtttgctttttaccagttcggcaaacggcacctgaacgatacggcgtttattatggcgcgctttgtgccacgggtcagggaaaaagagctgcaccatgcgcaaactattgtcaggaatcattttatgcagcacttcaaccgcatcgtgacacatcacgcgcaggttgcttaaaccttcttcatgcgcagaagccaggcacgcaccaacgcccggactatgcacttcaatgccgaggaagtcctgctcagggcgatctttagccattgccaccaggctcgcccccatgccaaaaccaatctcaagcgtcaccggcgcttcacggccaaaaagcgcggggaaatccagcatatcttcgctgaactcaacgcccatcaccggccagtagttttccagcgcatgttcctggcctttggtcagtcgcccctggcggcgcacaaaactacggatacggcgcagtgggcggccgttttcatcaaattccggactaatgacgtcgtttttcataaaggtttagtcgcttgtgaaagtgttctgaaaacgggcattatccaaagttagttgccggatgcaagcatgataaggccgtggctgcggaaagttccggtttacaccctgccgtcgctgtgctgcaatcttgcccccaacaacagtgaattcggtgaccatgcaagcgagccaatttagtgcccaggttctggactggtacgataaatacgggcgaaaaactctgccctggcaaattgacaagacgccctacaaagtatggctcagtgaagtgatgttgcaacaaactcaggttgcgaccgttatcccctattttgaacgctttatggcgcgcttcccgacggtgaccgatctcgccaatgcgccgctcgacgaagttctccacttgtggaccgggcttggctattacgcccgcgcgcgcaatctgcataaagcggcacaacaagtggcgaccttacacggcggtaaattcccggaaacctttgaggaagttgcagcactgccgggcgtcgggcgttccaccgcaggcgcgattctcagcctttctctgggtaagcactttccgattctcgacggtaacgtcaaacgcgtgctggcgcgctgctatgctgtaagcggctggcctgggaaaaaagaggtcgagaataaattatggagtttgagcgagcaggtgacgcccgcggttggcgtggaacggtttaatcaggcgatgatggatttgggtgcgatgatttgtacgcgcagcaaaccgaaatgtagcctctgtccgctacaaaacggatgtattgccgccgccaacaatagctgggcgctttatccgggcaaaaaaccgaaacagacgctgccggagcgcaccggctactttttgctattacagcacgaagatgaagtattgctggcgcagcgtccgccgagcggattgtggggcggtttatactgtttcccgcagtttgccgacgaagaaagtttgcggcagtggctggcgcaacggcagattgctgccgataacctgacgcaactgaccgcgtttcggcataccttcagccatttccacttagatattgtgcctatgtggcttcccgtgagcagtttcaccggctgcatggatgaaggcaatgcgctctggtataacttagcgcaaccgccgagtgttggcctagcggctcccgtggagcgtttgttacagcagttacgcactggcgcgccggtttaacgcgtgagtcgataaagaggatgatttatgagcagaacgattttttgtactttcctgcaacgtgaagcagaaggtcaggattttcagctgtaccccggcgagctgggaaaacgcatctataacgagatctccaaagaagcctgggcgcagtggcagcacaagcaaaccatgctgattaatgaaaagaaactcaacatgatgaatgccgagcaccgcaagctgcttgagcaggagatggtcaacttcctgttcgagggtaaagaggtgcatatcgagggctatacgccggaagataaaaaataaaaacagtgccggagcacgcctccggcaacttgcataaaaacaaacacaacacgcacccggaatgatgaaaaaatatctcgcgctggctttgattgcgccgttgctcatctcctgtagcacgaccaaaaaaggcgatacctataacgaagcctgggtcaaagataccaacggttttgatattctgatggggcaatttgcccacaatattgagaacatctggggcttcaaagaggtggtgatcgctggtcctaaggactacgtgaaatacaccgatcaatatcagacccgcagccacatcaacttcgatgacggtacgattactatcgaaaccatcgccgggacagaacctgccgcgcatttgcgccgggcaattatcaaaacgttattgatgggtgacgatccgagtagcgtcgatctctattccgacgttgatgatattacgattagcaaagaacctttcctttacggtcaggtggtggacaacaccgggcagccgattcgctgggaaggtcgcgcaagcaacttcgcggattatctgctgaaaaaccgtctgaagagccgcagcaacgggctgcgtatcatctacagcgtcaccattaacatggtgccgaaccaccttgataaacgtgcgcacaaatatctcggcatggtccgccaggcgagtcggaaatatggcgttgatgagagcctgattctggcaattatgcagaccgaatcttcctttaacccgtatgcggtcagccgttccgatgcgctgggattaatgcaggtggtacaacatactgccgggaaagatgtgttccgcagccaggggaaatccggcacgccgagccgcagtttcttgtttgatcctgccagcaatattgataccggcaccgcgtatctggcgatgctgaacaatgtttatctcggcggaattgataacccaacaagccggcgttatgccgtcatcaccgcctataacggcggcgcaggcagcgtgctgcgagtctttagcaatgataagattcaggctgccaatattattaacaccatgacgccgggcgatgtttatcagacgctgacgacccgccatccctctgcggaatctcgccgttatctttataaagtgaataccgcgcaaaaatcctaccgccgccgataattccattaaccgcccctgacgatgctcaggggcaaaaatgttatccacatcacaatttcgttttgcaaattgggaatgtttgcaattatttgccacaggtaacaaaaaaccagtccgcgaagttgatagaatcccatcatctcgcacggtcaaatgtgctttttcaaacactcatccgcatcacgatgtgaggaaattaacatgaatcttaagctgcagctgaaaatcctctcttttctgcagttctgtctgtggggaagttggctgacgaccctcggctcctatatgtttgttaccctgaagtttgacggtgcttctattggcgcagtttatagcagtctgggtatcgcagcggtctttatgcctgcgctgctggggattgtggccgacaaatggttaagtgcgaaatgggtatatgccatttgccacaccattggcgctatcacgctgttcatggcggcacaggtcacgacaccggaagcgatgttccttgtgatattgattaacagctttgcttatatgccaacgcttgggttaatcaacaccatctcttactatcgcctgcaaaatgccgggatggatatcgttactgacttcccgccaatccgtatctggggcaccatcggctttatcatggcaatgtgggtggtgagcctgtctggcttcgaattaagccacatgcagctgtatattggcgcagcactttccgccattctggttctgtttaccctgactctgccgcatattccggttgctaaacagcaagcgaatcagagctggacaaccctgctgggcctcgatgcattcgcgctgtttaaaaacaagcgtatggcaatcttctttatcttcagtatgctgctgggcgcggaactgcagattaccaacatgttcggtaataccttcctgcacagcttcgacaaagatccgatgtttgccagcagctttattgtgcagcatgcgagtatcatcatgagcattagccagatctctgaaaccctgttcattctgaccatcccgttcttcttaagccgctacggtattaagaacgtaatgatgatcagtattgtggcgtggatcctgcgttttgcgctgtttgcttacggcgacccgactccgttcggtactgtactgctggtactgagcatgatcgtttacggttgcgcattcgacttcttcaacatctctggtagcgtgtttgtcgaaaaagaagttagcccggcaattcgcgccagtgcacaagggatgttcctgatgatgactaacggcttcggctgtatcctcggcggcatcgtgagcggtaaagttgttgagatgtacacccaaaacggcattaccgactggcagaccgtatggttgattttcgctggttactccgtggttctggccttcgcgttcatggcgatgttcaaatataaacacgttcgtgtcccgacaggcacacagacggttagccactaattacgcaaagaaaaacgggtcgccagaaggtgacccgttttttttattcttacttcaacacataaccgtacaaccgtttcacgccatccgcatcggtttcgctataaacaccttgcagctccgggctaaatcccggcaacaaattcaccccttcttccagtgcaaggaaataacgttgaaccgccccaccccagacttccccgggtaccacgcaaagcacgccaggtggataaggcaacgccccttctgccgcaattcgcccttcggcatcacgaatccgcaccaactccacgtcaccgcgaatataagcgctatgcgcatcctgggggttcatcaccacactcgggaaactctgctggcggaacatcgctttttgtaggtctttgacgtcgaaactgacatacagatcgtgcatctcctgacacaactggcgcagggtgtagtcgcgatagcgcaccggatacttgttataaacgctcggcaacacctcaaccagcgggctgtcatcctcaatatgctgttcaaattgcgccagcatcgccaccagttgtgccagcttctcgtggctttccgccggagttaataaaaacagaatggagttgagatcgcacttctccggcacaatgccgttctcacgcagatagtgcgccagaatcgtcgccggaacgccaaagtcgctatattcgccggtttcggcatcgatacctggtgtagtgagtaacagcttgcacggatcaacaaaatactgatccgcggcatatccttcaaagccgtgccacttcgcccccggctcaaaactgaaaaaacggcggtcgctggctaacacacttgtcggataatcctgccacaatttgccatcaacaacgggcgggataaacgggcggaacagcttacagcgcgcaagaatagccttgcgcgcttcaatccctatctcaacacactcagcccacagccgacgcccactctccccttcatgaattttggcgttaacatccagtgcagcaaacagcggatagaaagggctggtagaagcatggagcataaaggcgttattcaaccgcttatgcgggcaaaaacgcgcctgtccgcggatatggttatcttttttatggatctggctcgtctgactgaatcccgcctgctgtttgtgcacgctctgagtcacaaagatccccggatcgttttcgttaagttctaacagcagcgggctgctatccgccatcatcgggataaattgttcataaccgacccacgcggaatcaaacagaatgtaatcacacagatgcccaacggtatcgatcacctgacgggcgttatagacagtgccgtcataggttcccagctgaataatcgccaggcgatacgggcgcggcaggtcggctttttctggcgcaacgtcgcgaatttgctggcgcagatactcttcattaaaacagtgcgcatcaataccgccaatgaaaccaaacgggttgcgactagcttccagatagaccggcgtcgcccccgcctgaatcagcgcgccgtgatgattgctcttatggttgttacggtcgaagagcaccagatcgccacgcgttaacagcgcattcgtcaccactttattcgctgcgcttgtgccgttcagcacaaaataggttttatcggcatgaaagactttggctgcgaatttctgcgcatctttcgcgcttccttcatgaataagcagatcgcccaattttacgtcagcgttacacatatcggcgcgaaagacgttctcaccaaagaaatcgtaaaaatggcgtccggcaggatgctttttaaaaaacgcaccatgttgatgtccagggcaagcaaaggtgctgttgcccatctcaacgtactgcgtcagcgtgtcataaaacggtggcagcaaattctcttcatactgacaggctgcggattccagctccagccactgctgctcgttgccgttgattaccgccgtaacgcccgcaggtaattcaacagcatgttcggaatacaaaaacaccggtagatgaaaaccggtgcgcttaagcaacgcaagaatgccactgcgactatccgcagcggtaatgacgactgccgcgacgtccgtaaaatcagtatctcccaacgccaccacgcgacgatgagaagaaagtcgggataccagttcactactggcggcaatattcatacttttcataagcgcaaacccgtttcggggaagtaagaataccggacaaggtggaaaaccctgccccatgagatatgggtcaaactggtcaccagctccgaccgccagacatcagtaaaagcagaaacgctctgattttactgttgtcctgcagtgagcgtgcgttaacttcaccgcatgagcagtaacatagaaagggaaacgtttcgcgcgaaacggcgataagcgagagaatgtaaggagatggcgtgcatcgggcaaactccgtacagagaggagaaaattcgcgcaatcatggcacctttcgctaaagcgtgcaagccaggactttgcgaacaaacaagccatcgacggcaccaaacggtcataataagaaaatcaaacaatacagctaacaggaactcttgtggtcatcggcccttttatcaacgctagtgcagtcttactgggtggcgttctcggcgcactgctcagccaacgcttaccggaacgtatccgcgtctccatgacaagtatttttggtctggcaagcctggggattggtattttactggtggtgaaatgtgccaaccttccagcgatggttttagctacgctacttggcgctctaattggcgaaatttgtttgctggagaaaggtgtcaatacagcagtcgccaaagcacaaaatctgtttcgtcacagtcgtaagaagccagcgcatgaatcttttattcagaattatgtcgcgattattgtcctgttttgcgccagcggcaccgggatcttcggggcgatgaacgaagggatgaccggcgatccgagtattttaatcgccaagagttttcttgatttctttacggcgatgatcttcgcctgcagcctgggtattgcggtaagcgtgattagtatcccattactgatcatccagttaacgctggcgtgggctgccgcgctgattttaccgctgaccacaccgagcatgatggcagacttcagcgccgtaggcggtttattgctgctggcaaccggattacgcatctgtggcattaaaatgttcccggtggtcaacatgcttccagcactccttctggcaatgccgctttccgccgcctggaccgcctggtttgcctgacaatgcgtgcaatatcggcaaagtgatgatagattgtgcagtctgcagtaaattgaagaaatttgattgacgagacgaggcgaatcaggtttaatgcgccccgttgcccggatagctcagtcggtagagcaggggattgaaaatccccgtgtccttggttcgattccgagtccgggcaccactaattcttaagaacccgcccacaaggcgggtttttgcttttggatctgacaataaccttcacgaaaaaaattagcttataaagtctgggggaattactctcgccacgttaacgagagtaattttattgatattaatctcctgatactttacccccgtccaaactccagccgctgcacattcaccatcccaggcttctcagcagcactgacatcaatttgtgtcacccgcagcgcatagaacgccattttgaatttacgaacggacgcattatcagtgactttaacggcatgggcaaagtgaaatatcattttttaacgataaaaagagtgttatttcttgtgtatcagacaataagcattcattcaaaacctttagaaataatcaaaacacaggtattccactggttaatatattcacatatgaaatgaataaatattggaatatataaatattgaatattttgattaatccccgtactgattattcttcataatcagtacggggttgctacaacatgtattactttttcaccacaattaacggttcaatatcactctcttttttgatgaccagactttcatcaccgcgcaaacacgtcccaccgtagttgccgccaacggtgaaggtacatacctgaatgtatttaccgtccactttcggcaaacaccacagttgctgatagatgtttttctgctcggcaaatttaccgctggttttgtccagcacctcttcatgatggctgacgaggtcgatattgctgccacagcgaccggcgatcggtttcactgcgtaacctgttttcaccagttcatcattaacagtgaaatcggtatccagcaggtaacgatggtgcgggaacaggctccagaggatcggcagaatcgctttgttgccggggatcaccgtccacagcggctcaaagaccagcacttccgggcgcagcaatacgtcgataagacgcacttcgttttgcggatgaccggtacggattggcaccgcagcaaactcacggtcgctaacttcacgaatctgatcaaacgcggtttcccacgcccaggttttccacacgcagttaaccagtcgcccttccccatcaatcagttgcccggcagcatcccagcccagttcatccaatccacgcaagatacgcgtttcaaagcccgcctggtgcagcgcctgctccataaactgcgcgtgatagttttcctcgatatctttgtcctgcatgatatggacaaacggacgtgcacgactgtgtttccaggcaccagccaattcgttaatcagcccttccgccggattgaagccgttgcctttatagccctgctccgcccaacgttcgaggatcaagcccgcttcggtatgacaggaggcggagtcggcgttgtactcgtaaaccttcaggccacgctcatccatgcagaaatccatacgaccagtgatcatatggtgacggcgacgctgccaggagagacgcaaacgtggccagaggattttcgggatgtcgaacagcgccagcaggttgtcatctttcagcaccttgtcggttgcgtgaagatacatcaggtgcagctcgttggtggctttaattagctcctgctcggcactctcggtaatggtgtagtaatgataaggatcctgattgatcacctgaccgttggcctgcacataggcgttttgcagcggatctttttcatccagccatttaccgtcaaactggcctttgttttccaggcgcgctccgctgattttcagcagctcgcctgcaatttccggctgcggtaagctgtattcagtatcttccgtctggatcatccagcccagaatggtggtgtcatcaaaagtgtctttcagggtatagcagccgttttcgaccaccatctccagctcgcgcgtccactgttgcccttgcggcaacggggaatgaatcacgttctgttccgcaatacggactttgttgccatgcaattgggtaatgatggcgacatggccagtgtctttaaattcaccgcctttatcccagataagaagcgcacccgcgaccggcgcacgcgggctgccgttaggaaatgcctgcaatggcaggatgttgtcattaaccacttctcgcaggaagcgcaggctgaaaatctcccacgccatacccacgtcagtaaagaccacaccgtaattcagaaagagaaaacggcgagcaaattcaacgcattgccacttgtggcccatatattcgtcgtcgatatagctacggaatacggcgtcatcttcgtattcctgcggatcgagagaactgtaatcactagagtagattgctaccccacctggggcgtagcccaataatgtcccgaacggggcatcctggctggtcgttcctttgctcatcactttacctttaacaatacaacctaagcagttggcgtaattgttgtgctctgattacctgctcagcgacattaaccggacagaggtcagactaatcatacacctcatcgcagcggctggcgcaaagggttaaaaaattcacattctgtacagcaagtgacctgctacactgcttcaacactaccactcagaaggcaactcactatgacagacaatacttatcagcccgcgaaagtctggacgtgggataaatccgctggcggcgcgttcgccaatatcaatcgcccggtttctggtccgacgcatgaaaaaacgctgcccgttggcaaacacccattgcaactttatagcctgggaacgccgaacggtcagaaagtaacgattatgcttgaggagctgctggcgctgggcgttactggtgcagagtacgacgcctggctgattcgtattggcgatggcgatcaattctccagcggctttgtcgaagtgaacccaaacagcaagatcccggcgctgcgcgatcatacgcataatccgccgatccgcgtgtttgaatctggtagcatcctgctttatctggcggagaaatttggctacttcctgccgcaggatttggcaaagcgtactgaaacgatgaactggctgttctggttacagggcgcggcaccgttcctcggcggtggttttggtcacttttaccattacgcaccggtaaagattgagtacgccatcaaccgctttaccatggaagccaaacgtctgctcgacgtgctggataagcaactggcgcagcataagtttgttgcgggcgatgagtacaccattgcggatatggcgatttggccgtggtttggcaacgtggtgttaggtggtgtgtatgatgccgctgagtttcttgatgcgggcagttataagcatgtacaacgctgggcgaaagaagtaggcgaacgtccggcggtgaaacgtgggcgtattgttaaccgcaccaacggaccgctgaatgagcagttgcatgagcgccatgacgccagtgatttcgagacgaatacggaagataagcgtcaggggtaagggttggtgttcgtcgcagcaagccatccaggccggataaggcgttcacgccgcatccggcaatcgtgcacaatgcctgatgcgacgctgccgcgtcttatcaggcctacgaaagctaatcatcacgcgctggtaatgtcgtaatccatttggcgcagtgcgtctaatgtggctttggcttcatcttcgtcgatgatgctcatggcaaatccgacgtgtaccagcacccactggcccagtagatcggcagggttaccttcacaaatcagggcgatattcacatcgcgcttgataccacatacttcaacctgcgcaagctggtgaatatcttcaccgacagccagcacctggcctggaacgccaatacacattattaactccggttattcaacttcaatacttttgacgatcaggctatcgccggtatcgacacgcaaccgctcgccgtgacagagcggacactgcgcatcgtgctgatgaatctccaccacctggctgcaatcccagcaccaagcctgggcgggtttatagacgatatgtaaatcgcacccttgcgccaccgttccgtggcagacaatttcaaaactaaaacggacggcgctctcctcaacgcaggagagcgcgccaatttccagccacacggcggtgacgcgcttaacatcgtgctgctccgcctgccgttggataatttcaacggcgctctggcaaagagacaactcatgcattttcgccactcctgcgaccaaacagcagggcgcgacgccctgcgtgtggtacatccggattcgtgactggcaggctaaggatcattcgtgcgcagtcatccgtcaggcgttggccctcttcaatgctcatgctgtggctaagcgggctcatcaggctacaggagagatattggctaacaccgtccagttcgccaacggtaaaggtcatagtgccatacggcagttgcagaccaattttttcactcactttgcgcagcggccagagttgatccgggccggggaagataactgcactcagcatccacggggtgatcacacaccccgtccactgaccttcgaacagcgtaaaatcagaaacatacaccggcatactaggatgcagaaaagagagatcgtgcatgctacgccgggcaatttcttcaaacgctgcctgtacttgcgccttcggggaggtctggaaacctgctatctcttcagtcatgaatcgcctcccgtgggatggcttccacgccagattcacgcagcgcagccagaacctgctcaagcgcaggttcaatcattgcttcaaccgtcggcgttaagccgatgtgtggctccaggctttccgggatcacgccgaccagggtcagctttttcggaaactcgccggtgaagcgcagggcgctcaagacgtcggccaggccaagctgatgcggagagattttgttggtaaacaacgccggaacttcttcatcccgcaggatcatcatcgttcccggcgcgttctttttgctgacaatggcatccgcaataatcaaatgatcgcgatttgccatgtcgccaagcagctccattcccgccgtgccgccatcgaggatctcaacataatccggcagaatgtatcgttgctctaacgcttcgacaatccgcacaccgatggcttcatcggtcagcaaaatattgccgacccctaagactaaaatacgcattacagaaccttcacactaaccacttcgttgccgtcagcatccactacgtgtaccgcacaggccatgcacgggtcaaaggagtgaatggtacgcaccacttccagcggtttattcggatcggcaaccggtgtacccaccaggctctgctcgtaaggaccgacgtcatcattgaagttacgcggaccagagttccaggtacttggaacaaccgcctggtagttgctgatgataccgtctttaataaccatccagtgagagagcataccgcgcggcgcttcgaggaagccaacacctttgaattcacccgttgccggaatgttcggcttcacaaaggtggtgtgatcgcctttgccgatattggtgatcagtgcactgtattggttttgcaggatatcctgcaattcacagcagtgaacggtacgaccaataatacggcccagcgtggagtgcagctgtgccacttccagcgtgttgccagtcagtttctgataaatcgcaacgatttcattcagtttgttctgggtagattcgcgacctgccgccagtttcaccagcatattagccagtggccccacttctaccgttttgccgtagaaagtcggacttttcacccaggaatatttcccgtcgtcagaccaaccatcataagccggaatggtggtgccttcccacggtgcctgcggcgcttcgtctttataccaggagtgcttcgcgctttcctgaatgcctttgatcaggtattcatcggaatgagaagtgatcggacgatagctggacagatccgcattctcaatgtagccgcccgggaacaggaagctgccgtttttactgtcggtcgggaattccggcacgctcaggtagttcaccgcacctttaccgcgtgtcagccattccgggtagaacgcggcaataactgcggtatcaaccttataaacctgctcaacaaagtcgctcagtttgtcgatgaaagacttgatgtacatcaggcgctcaaggttcagcacgcccaaaccgtcgaggttgatcgggttcgcgacaccacctaccgccaggttctgaatgtgcggcgttttaccgcccagcagcgccacgacgcggttagcgtcacgctggcactccaacgcttgcaggtagtgcgctaccgcaatcaggttcacttccggcggcagtttcatcgccggatgaccccagtagccattagcgaaaatacccaactgaccgctggcaaccagatctttgatcttgttctgaactttggtgaactcttccggactgttcaggtgccaggtgctaacgcctttcagcatttcggaggctttggttgggtcagcttgcagtgcagaagtgatgtccacccagtccagcgcgctaagctgatagaaatgaacaatatggtcatgcgtggtgtgcgcagccagaatgatgttacggatgtattgcgcgttaaccggaacgtcgatattcagcgcactttctgccgcacgaacggaagacagcgcgtgagtggtagtacatacgccacagatacgttgcacaatcatccatgcatcgcgcggatcgcggtttttcacgatctcttccatgccgcgccacatggtaccggaagcccatgctttgctaacgacgccattttcgatttcgcaatcgatgcgtaaatgcccctcaatacgggttaccggatcaatagtaattctctggctcatgctttgctcgcctcatgacgattatgatcgttttgttttaaaggaggaagtatcggcagtagacgaatgagtacgatgtaagcgcaaatctcaatagccacaaaaccaatagaaatcaacagttcttcccaggtcgggaagtaggcgtaaccgccgcccgggttgaatgccaccaggctataggtcagacgccaggttgcacaacctaacagtgcgctcagtgcactcaggaacagcatgcgggaatcattacgcagcttcgccacacgcagaacgaccagcgggaagagcatcagcaggacttcaatccagaacatcacggagtagaagtcaccggcaaacgctaagctcagcttgtcgcgatagataagctcgccaaagcgcagcacgatgaaaatcgccagcaacacactgatggtgttggtcagcttaacaaacagactcttttcatccggaccgttgccacgcagacccgcctgcaccaggctaccttcaaagatgacaatgctgaagcccatgatgaacgccgtcagcaggctgaacagcggcaacatttcatagctctgccacaacggatgcaccttgtagcccgcgctgatcatcaggctccccatactagactggtgcatggtcggcagcagcgcaccgagcgcgatgatgaagaacatcaccttgtttagtcgctgtaggctcaccttccaccccagacgttcaaacagtgccggagcaaactccagtgccatcacgccgatatagatggtcatacagaccgccgtctcgaacagtacgctgttcacgttgaagtgacccggaatgtagaagtacggcaggttccagtagcgacccacgtcgatagtgatgctcaagccacccagactgtaaccaaacagactcgccaacagcgccggacgcaccagcggatggtattgcccacggttaaagacgtataccgcccacgccagcgcccagccgccacaggcaaagccggtgccaatcagcaggtcaaacgcgatccacacgccccacgggaagccgccgttcaggtcagagacagagcccagaccgaacaccagacgcttcacaatcaggagcatacagatgacgattaacggtccaaaaatcatgaccggtttactgatgattttgccgcccagcggttgtggatcatgactcatgatcgtctcctccgtcgtgattattcaactctcatgatcgtctcctccgtcgtgatggtcgtttttggtgttgcgacgaaccagcacggttaagcccgccagcacagccagtggtagcatcatgcctttatacagggtgtgttgaatattttcggaacgcgcaccggtagaaagatcgtccagtttcggcaggtcgagattttcataaggcacacccgtcagtaccagaacctgagtaccgccgccctctttctcgccgtacagatgcggataatatttcggcaccgtatgcaggtaagtgtcgccagatttcagcgtctgacgcggatagtggtattcgctgccaggcttcagcgccagacgttttttcgcctccgccatcagctcttcacgcgtaccgaaaatcaccgcgcccgccgggcacacttctacgcagccaggtagaccgcctttatcgagacgttccacacctttctggttgcacagctcgcacttatgcagcgcaccaaacgggttgttgtagtcgtacttcggcacgttgtacggacaggcgaccatgcagtaacggcagccggtgcacacatctttgtcgtaatggacaatgccggttttcggatcttttttcagtgcagagaccgggcacacagagacacagttcggatcgacgcagtgcatacactgtttcttaatgtacgcgtagccgttctcctcctggtctttgttgacccctgtgccgctggtccacacctgaatgatgttattggtatacgggctcagtttgtcgttgttgctccaggtctgttccccttgcgggttacgttcagggaaattgatatcctgacacttggtgacgcaagcctggcagcctacgcacaaggtgctgtcgtacaacatccccaggcttcccggaattggcgggcggttttcagcagccgcatgactgacagacggcagcgcgcccgtcagcaatgccccgcaggaggctgctttaataaaattacgtctgttcacggttattctccccgactgtcagcgttatctttcttttgctgacgacccagttcacgcaccgccatcacgctgacaccggcaaccaacccaaccacaccgccgagcaaaccaatagcgcctgcagagacgttgccgccctctttagcgttaacatccggtttctgactacgcggagtttgattttcgacgttggcaagctgatggatgcctttatggaagccgataccttcttcgttacagccatagcaagggtgaccaatcgccaccggccacacaccgccaacatcgcagaattgcagcgtactgcagttgccgtaagtttctggccctttacagccgaggtggtacaggcaccagccttcgcggtggccttcatcaccgaactctttggcaaaacgaccagcatcgaagtgcgggcgacgttcgcagtgttcgtgaatcagacggccataggcgaaggtcggacggtttttgtcatccagtttcggcggtttgccgtaagtgatgatgtgcgcaacggtcgcgaggaagttgtgcgggttcggcgggcagcccggaatattgataacggttttgcctggcagaacttcttgcaggctgactgcgccagttgggttaactccagctgcggcaacaccgccccacgcagagcaggaaccgatagcgataatggctgctgcgccttccgccgctttgcggatgtgatccacaatcggctcaccggcaaccatgcaataaataccgttatcttttaatgggatggaaccatccaccactaacacatactgccctttgtacttctcgagagcgttatgtttgttctcttcgacctgatgaccgaaggcggcggaaagcacttcgtgatactccagagagatagtctccagtacgaggttttctaccgttggatgcgttgcacgaagcagagattccgtacaaccggtgcactcctgcgcgccaatccagataactggcggacgctgcgggttagtaacgctttcggccatctctgcagcggctttgctacttaaccccatggtggcggctaatgctgcacaaagcttcatgaaatcacgacggttaatgccgtgagaatggatgagggtgttatctccagtcatttatagttattccgttgcgaagacctggcatatattttgcctcaatcgcaaaatcaataatgcgatcgatgcgccatttaccacacatttattatggttatcgatatcatgatactgcggcggggcgctaaaacgaagggaagaagcattagtgtaattaattaaagcaagataatacgtatgtttgatcaattttcgaggcgataaccggccataaaaaagcgcaacgtagaacaggaattattctcacgaaagaaatccattaccatctctttatccagtccatagcggcgcgtcagaatacccgcttcccaggcgctaagctggcgatctccggtcttttcgtacatccggtgactgtagcctaatacaaaaccgcgtttataatcggcacagaattttgtcacattaaccgcactgtcggcatgcgttgcttttaatcccgccattaagcctttaccaaaatggttattcatcgttcacctcattcgctatatattgtcatatatagcgatattttaggcaaagaacgacttttgcgcacgctattttttcatgcttgtttaagacgtaatcccgtaagagataaacctatcaggagagatatttatcgaaccatttcagtgtcctttgccaggcaagatcggcggcagatttgtcataacggggcgtggaatcattatggaatccgtgattaacccccggatagatatacgcctcataaaccttattattggctttcaacgccgcctcgtaagcaggccagccctcgttgattcgggtgtccagttccgcgaagtggagtagtaaaggcgcttcaatcttcgccacatcggcagtgggtgcctgacgaccataaaacggcaccgcgcaggccagttccggatacgcgacagccgccgcgttgcttacgccaccgccatagcaaaatccggtaatacccactttgcctgtcgcttgcggatagcgttgcataaactcaattgcggcaaagaaatcattcatcagtttgttggatcaacctgctgttgcagctcacgacctttatcatcatttcccggataacctccaacggaacttaagccgtcaggtgccagggcgatataccccgccttcgccactcgccgtgccacatcttcgatatacggattcagtccacgattctcatgcaccaccactacggctggcgttttgccgctcatctttgcgggcttcaccagataaccccgcacctcgccgtgaccatttgggctaggatacgtgatgtactcagcaacaatttccgggtcggtaaactctacctgagtcgccagcgcataatttggcttgagcaaatcaaacaacgctaatgccgtcatcccgcctaccgcacttcgccgcaaggttgaggaactcacgtttcgagattttcccgtgagcgtaatagtcatagtaatccagcaactcttgtgggaaatctttggcggttaaacgcggcatcgttgcactcctcagttggtgtttttttaagcaaagcataagcacgtatttttgcccagtttttcgtcactctgtgagccagactacgggatacgcgctggcgaatcgctaaactagaaacattgtttcgaaattgaacggtggaaaggagaggtcatggtctggttagcgaatcccgaacgttacgggcagatgcaataccgctattgcggaaaaagtggtttacgcctgcccgcgttaagcctcggtttatggcacaatttcggtcacgttaacgcgctggaaagtcagcgtgcgatcctgcgtaaagcgtttgatttgggcattacgcactttgatttagccaacaattacgggccgcctccaggaagcgcagaagagaactttggtcgcctgctgcgggaggattttgccgcttatcgcgatgaactgattatctctaccaaggctggctacgatatgtggcccggcccttacggctctggcggtagtcgtaaatacctgctcgccagcctcgaccaaagcctgaagcgtatggggcttgagtatgtcgatatcttttactctcatcgcgtcgatgaaaatacgccgatggaagaaaccgcctctgcgctggctcatgcggtacaaagcggtaaggcgctgtatgtcgggatctcctcttacagcccagagcggacgcaaaaaatggtcgagttgctgcgcgagtggaaaattccgctgttaattcatcaacctagctacaatttactgaaccgctgggtggataaaagcggcctgctggataccctgcaaaataacggcgtgggctgtattgcctttactcctctggctcagggattgctgaccggaaaatatctcaacggcattccgcaagatagtcggatgcatcgtgaagggaataaagttcgtggtctgacaccgaaaatgcttaccgaagccaacctcaacagcctgcgcttattgaatgaaatggcacagcagcgtggacaaagtatggcgcaaatggcgttaagctggttgctgaaagatgatcgcgtgacgagcgtattgattggtgccagccgcgcggagcaactagaggagaacgtgcaggcgctgaataatctgacatttagcaccaaggagctggcgcagattgatcagcatatcgccgatggcgagctgaatctgtggcaggcgtcttccgataaatgacctgttaataacgggcgcgcgaaccgcgcccgaatcagatcagtgattatgacgagtcagtcggtcaagatagcccatcacaaatgcagaaagcacaaacgtcagatggataatgacgtaccacatcagtttgttatccgggacatttttcgcatccataaagacgcgcagtaagtgaatggaagaaattgccacaatgctcgctgctactttgtttttcaggctcgttgcgtccattttccccagccagttcagcttctctttgttctcggagatatccagctgactgacgaaattctcataaccggaaaacatcaccatcaccagcaaaccgccaaccagcgtcatatccaccaggctcagcaacacgaggatcaaatcactttccgccatgctgaagatattcggcagtacgtgaataatctcctggaagaacttcagcgccagggcaactaacgccaggctaaggccaaagtacacgggggcaagcagccagcgagaagcatacattgcattttcaagaaaacgttccatacattcctgtcgtgtagttaaaacgggcaacagtatatcgcaattgagtaaacagcacgcaacagcaaatcaacatatacgttaaacctttgtcgcataattctgaggtttagggatcttcctggttcccttatcaacgcatcgagaacgtctacccttaaaggacgttgaacctgaagggagaaaaacgatgtctcatttaaaagacccgaccacgcagtattacactggtgaatatcccaaacagaaacaaccgacgccaggcatccaggcgaagatgacaccggtaccggattgcggcgagaaaacctatgttggtagcggtcgcctgaaagatcgtaaagcactggtgacagggggcgattccggaataggtcgcgctgccgccatcgcttacgcgcgtgaaggggctgacgtggcgatcagttatcttcccgtggaagaagaagacgctcaggatgtgaaaaagatcattgaagaatgcggacgcaaagccgttctgctgccaggcgatttaagcgatgagaaatttgcccgtagcctggttcacgaagcgcacaaggcgttaggcgggctggatattatggcgctggtcgccgggaaacaggttgccattccggatattgcagacctcaccagcgaacagtttcaaaagacctttgccattaacgttttcgcgctgttctggctaacccaggaagcgatccccctgctaccgaaaggtgcaagtatcatcaccactagcagtatccaggcataccagccaagtccgcatttactggactatgcggctacgaaggcggcgattctgaactacagccgtggcttggcaaaacaggtcgcggagaaaggtattcgggtgaatattgtcgcgccaggcccgatctggacagcactgcaaatttccggcggacaaacgcaggataagatcccgcagtttggtcagcaaacgccgatgaaacgtgcggggcaaccggcggaactggcccctgtatatgtttatctggcaagtcaggagagcagctacgtcaccgcagaagtgcacggcgtgtgcggcggcgagcatttaggttaaaaaaatgcccggttgtgaaaagcaaccgggcatcattgtgaattcactcttacctgatgtggcgaaaacgccttatccgcctacaaacgcatgaagattcaacatgttgcaatagattttgtaggcctgataagcgtagcgcatcaggcattgagcacctaatgccggatgcgtcgtgaacgccttatccggcctacaaacgcacgaagattcaacatgttgcaatagattttgtaggcctgatgagcgtagcgcatcaggcaattctactttacttcgctttggcggtttcttcgccgaccagacctatcttcaggtaacccgcctgatgcagcgtatccattaccttcatcaacgtctcgtaatcgacggttttgtccgctcggaagaagatggtggtgtctttcttgccttcggttaacgcattcaacgccgtaatcattgtttcatcggtgaccggatcgttaccgataaacatgctgttgtctgccttcacgctcagataaaccggtttttccgggcgcggctgcggcgtgctggtagaagcaggcaagttcaccttcacatctaccgtcgctaacggtgccgccaccataaagataatcagcagaaccaacatcacgtcgataaacggcgtcacgttgatatcatgcatttcgccgttatcgtcgaggttttcgttaagatgcattgccatcggatattatcctgcgcgtaatttttgtgcgacacgaaccggatgcgcagcggcgctggcttccagatccaggtcacggctttgcagcaacaatacctgcgctgcaacatcacccagcatcgctttaaagccgccaatctggcgtgcaaatacgttatagataacgaccgcaggaatcgctgccacgaggccgattgccgttgctaacagagcttctgcgatacccggcgcaacgactgccaggttagtggtctgcgtttgcgcgataccaataaagctgttcatgatgccccagaccgtaccaaacagaccaacgaacggagaaatcgcgccgatggttgccagatagccgttaccgcggcccatttgacgacccactgcggcgacccgacgctccagacggaagctggtacgttctttaataccttcgttatcgtcgctgccttcactcagttccagctcattctgcgcttcattgagcaaatgcaggcttaagcttttgctaccaaaatcagcggcgatatcgttggcctggtttaaggaacgcgcttcagccagcagttgctgctcgcgcttaaggcgacgcttctgattgaagaactctacgctcttactgaagaagattgcccaggtgactacggaggccaaaataagcccaatcatcacgcacttaacgacaatatcggcgtgctgatacataccccagacggaaaggtccgtctgcattaaattattacccactgtgtatctccaggacgcaagtcacaaaatctgcgcataataatatcaaaacgacgtcgaattgatagtcgttctcattactatttgcatactgccgtacctttgctttcttttccttgcgtttacgcagtaaaaaagtcaccagcacgccatttgcgaaaattttctgctttatgccaattcttcaggatgcgcccgcgaatattcatgctagtttagacatccagacgtataaaaacaggaatcccgacatggcggacaaaaagcttgatactcaactggtgaatgcaggacgcagcaaaaaatacactctcggcgcggtaaatagcgtgattcagcgcgcttctagcctggtctttgacagtgtagaagccaaaaaacacgcgacacgtaatcgcgccaatggagagttgttctatggacggcgcggaacgttaacccatttctccttacaacaagcgatgtgtgaactggaaggtggcgcaggctgcgtgctatttccctgcggggcggcagcggttgctaattccattcttgcttttatcgaacagggcgatcatgtgttgatgaccaacaccgcctatgaaccgagtcaggatttctgtagcaaaatcctcagcaaactgggcgtaacgacaagttggtttgatccgctgattggtgccgatatcgttaagcatctgcagccaaacactaaaatcgtgtttctggaaagcccaggctccatcaccatggaagtccacgacgttccggcgattgttgccgccgtacgcagtgtggtgccggatgccatcattatgatcgacaacacctgggcagccggtgtgctgtttaaggcgctggattttggcatcgatgtttctattcaagccgccaccaaatatctggttgggcatagtgatgcgatgattggcactgccgtgtgcaatgcccgttgctgggagcagctacgggaaaatgcctatctgatgggccagatggtcgatgccgataccgcctatataaccagccgtggcctgcgcacattaggtgtgcgtttgcgtcaacatcatgaaagcagtctgaaagtggctgaatggctggcagaacatccgcaagttgcgcgagttaaccaccctgctctgcctggcagtaaaggtcacgaattctggaaacgagactttacaggcagcagcgggctattttcctttgtgcttaagaaaaaactcaataatgaagagctggcgaactatctggataacttcagtttattcagcatggcctacagctggggcgggtatgaaagcttgatcctggcaaatcaaccagaacatatcgccgccattcgcccacaaggcgagatcgattttagcgggaccttgattcgcctgcatattggtctggaagatgtcgacgatctgattgccgatctggacgccggttttgcgcgaattgtataacattgccacttttggacaattttgcagacattttattgtgaaaagtcttaaattgttgcgtccgggatcaaggcgtcccggacgattcaggagtacaataggcagataaaggcttaaacgctgttccacaggaaagtccatggctgttattcaagatatcatcgctgcgctctggcaacacgactttgccgcgctggcggatcctcatattgttagcgttgtttactttgtcatgtttgccacgctgtttttagaaaacggcctgctgcccgccagttttttgccaggcgacagcttgttgatactggcaggcgcattgattgcccagggggttatggattttctgcctacgattgcgattctgaccgccgcagcaagtctgggctgctggctaagttatattcaggggcgctggttagggaataccaaaacggtgaaaggctggctggcacagcttcctgctaaatatcaccagcgcgccacctgcatgtttgaccgccacggtctgctggcgctgctggctggacgttttcttgcatttgtccgtacgctgctgccaaccatggcgggaatttccggtctgccaaaccgccgcttccagtttttcaactggttaagtggattgctgtgggtcagcgtggtaaccagttttggctatgccttaagtatgattccgttcgttaaacgccatgaagatcaggtaatgacgttcctgatgatcctgccaattgccttgttaaccgctggcttgttaggcacgctgtttgtggtgattaaaaaaaaatactgtaacgcctgacgattttccccgttcccggttgctgtaccgggaacgtatttaattcccctgcatcgcccgcattcttgccgcatcttcccccggcgtcacaccgaagtaacgtttaaactcacggctaaattggcttgcgctttcatagccgacgcgcatcgctgctgcgctggccttcatgccgtcatggatgatcatcatccgcgccttatgcagacggtaattcttcaaatactgcaacgggctggtactggtgacagacttaaaattatggtggaacgcgcttacgctcatgttggcttctgccgccagttgctcgacgctcaggttttcggtgtatttattctcaatccgtttcagcacgcggctaatcagactgaagtgagtctggcgactgaccagcgccagtaacgcgccgccgcaaggtccggtcagcacgtagtacagaatttcgcggatgatctgtttgccgagaatacgcgcatccagtggtcgctccatcacgtcgagtaaccgctccgccgcgcataaaatctcttcacttaacgtggcggagttaatcccgctggctgccatgctcggctggaaatgctcatcttcgccaatgtccatcaacagttcctgtaactgcaaaatatcgacattgagacgcaaccctgccagcggcacctcactcgtggcataggtttcgcactcaaacggcaacggcaccgtcagcagcaggtattcattggcatcataacgaaacacgcgttcattgatataaccgattttatgcccggaaaagagaattatgatgccaggctcgtacatcaccggtgtacgtgcgaaaggcgtctcgccatacaacaaacgcacatcgggcaacagtccactcaaactattttctttatttttcagtttattaactttatccgccagcaagcggcaaatctcttcacgtttcatatcgcgtaatttcttaggaataatgcggcaattactttgtgcgcaattttgtagcatttctccagcactctggagaaataggcaagacattggcagaaatgagcattgagagccagggcgctggcgatcacaatgaaaaacatcaggcagatcgttctctgccctcatattggcccagcaaagggagcaagtaatgaacaactttaatctgcacaccccaacccgcattctgtttggtaaaggcgcaatcgctggtttacgcgaacaaattcctcacgatgctcgcgtattgattacctacggcggcggcagcgtgaaaaaaaccggcgttctcgatcaagttctggatgccctgaaaggcatggacgtgctggaatttggcggtattgagccaaacccggcttatgaaacgctgatgaacgccgtgaaactggttcgcgaacagaaagtgactttcctgctggcggttggcggcggttctgtactggacggcaccaaatttatcgccgcagcggctaactatccggaaaatatcgatccgtggcacattctgcaaacgggcggtaaagagattaaaagcgccatcccgatgggctgtgtgctgacgctgccagcaaccggtagtgaatccaacgcaggcgcggtgatctcccgtaaaaccacaggcgacaagcaggcgttccattctgcccatgttcagccggtatttgccgtgctcgatccggtttatacctacaccctgccgccgcgtcaggtggctaacggcgtagtggacgcctttgtacacaccgtggaacagtatgttaccaaaccggttgatgccaaaattcaggaccgtttcgcagaaggcattttgctgacgctaatcgaagatggtccgaaagccctgaaagagccagaaaactacgatgtgcgcgccaacgtcatgtgggcggcgactcaggcgctgaacggtttgattggcgctggcgtaccgcaggactgggcaacgcatatgctgggccacgaactgactgcgatgcacggtctggatcacgcgcaaacactggctatcgtcctgcctgcactgtggaatgaaaaacgcgataccaagcgcgctaagctgctgcaatatgctgaacgcgtctggaacatcactgaaggttccgatgatgagcgtattgacgccgcgattgccgcaacccgcaatttctttgagcaattaggcgtgccgacccacctctccgactacggtctggacggcagctccatcccggctttgctgaaaaaactggaagagcacggcatgacccaactgggcgaaaatcatgacattacgttggatgtcagccgccgtatatacgaagccgcccgctaagctttttacgcctcaaactttcgttttcgggcatttcgtccagacttaagttcacaacacctcaccggagcctgctccggtgagttcatataaaggaggaacgtatggctaatccaaccgttattaagctacaggatggcaatgtcatgccccagctgggactgggcgtctggcaagcaagtaatgaggaagtaatcaccgccattcaaaaagcgttagaagtgggttatcgcagcattgataccgccgcggcctacaagaacgaagaaggtgtcggcaaagccctgaaaaatgccagtgtcaacagagaagaactgttcatcaccactaagctgtggaacgacgaccacaagcgcccccgcgaagccctgctcgacagcctgaaaaaactccagcttgattatatcgacctctacttaatgcactggcccgttcccgctatcgaccattatgtcgaagcatggaaaggcatgatcgaattgcaaaaagagggattaatcaaaagcatcggcgtgtgcaacttccagatccatcacctgcaacgcctgattgatgaaactggcgtgacgcctgtgataaaccagatcgaacttcatccgctgatgcaacaacgccagctacacgcctggaacgcgacacacaaaatccagaccgaatcctggagcccattagcgcaaggagggaaaggcgttttcgatcagaaagtcattcgcgatctggcagataaatacggcaaaaccccggcgcagattgttatccgctggcatctggatagcggcctggtggtgatcccgaaaagcgtcacacctagtcgtattgccgaaaactttgatgtctgggatttccgtctcgacaaagacgaactcggcgaaattgcaaaactcgatcagggcaagcgtctcggtcccgatcctgaccagttcggcggctaacatgcaaattctcccggtggcggtaatgttccgctaccggacttttcagaaatcatttattcccctcgcgtcccgcccgttgttactcttccttgttcaggaatgccaaatataaggacatcatcatgcagagccggaagctcttaaaagaacaactcatctatatccgggataaacgcaacggagaggtgaaaaacagatgaaaataatacttctgtttttagcagccctggcaagttttaccgtacacgcacagccccccagtcagaccgtagaacaaacagtccggcatatttatcagaactataaaagtgatgccactgccccttattttggtgaaaccggagagcgggcgataacttctgcgcgtattcaacaggcgcttaccctgaacgacaatcttacgctgccgggcaatattggctggctggattatgatccggtttgtgattgtcaggattttggcgatctggtgctagaaagcgttgcgataacccaaactgacgccgatcatgccgatgccgttgtgcgctttcgtatctttaaagatgataaagaaaagaccacgcagacactgaaaatggtggcggaaaatggtcgttgggtcattgacgatattgtcagcaatcatggcagcgtcttacaagcagttaatagcgagaatgaaaaaacgctggccgctttagctagcttgcaaaaagaacagccggaagcctttgttgccgaactctttgaacatattgctgattatagctggccgtggacgtgggtggtttccgactcttaccgccaggcggttaatgccttctataaaaccaccttcaagacggccaataatcccgatgaagatatgcaaatagaacggcaatttatttacgacaatccgatctgttttggcgaagagagcctatttagtcgcgttgatgaaattcgagtcctggagaaaaccgccgattccgcccgcattcatgttcgttttacgctgaccaatggcaacaacgaagagcaagaactggttttacagcggcgcgaaggcaagtgggaaatcgctgattttatccgcccgaacagcggcagcctacttaagcagattgaggcaaaaactgccgccagattaaagcaatgagctgaattaaataacaattagccggaacaataaataaaagggaacactatatgaaaacgattttcaccgtgggagctgttgttctggcaacctgcttgctcagtggctgcgtcaatgagcaaaaggtcaatcagctggcgagcaatgtgcaaacattaaatgccaaaatcgcccggcttgagcaggatatgaaagcactacgcccacaaatctatgctgccaaatccgaagctaacagagccaatacgcgtcttgatgctcaggactattttgattgcctgcgctgcttgcgtatgtacgcagaatgataaaaaaatccccggtagcgtgtcagttgccggggatattttttaacgtccaaccgccgctttaggccgtttcttcgcaccagcattcaccggacgagattgcgtagagctcgctttttttgccgtagcaggcgtctgacgctgggtcgccatcggcgtatgtttcgtcaacgccggacgggtattgcggttctggcgacgagcttcacgcatctcttcaatggttggcgcaggcactaagcaatcgcgacggctgccaatcagatgctttttgcccatcgcttccagcgcctggcggattaacggccagtttgccggatcgtggtaacgcaacaacgctttatgcaaacgacgctgtttgtcgcccttcggtacgaagacgtcttcgctcttataaccaatcttcgccagcgggtttttcccggtgtaatacatggtggtactgttcgccagcgggctcggatagaagttctgcacctggtcgaggcggaagcggtgctttttcagccacagcgccagattcaccatatcttcatcacgcgtaccggggtgcgcggagatgaaataggggatcagatactgctctttacctgcctgtttactgtaagtatcgaacagctctttaaagcggtcatagctgcccatgcccggcttcatcatcttgcttaacggcccttcttcggtatgttccggggcaatcttcagataaccgccgacgtgatgggtcgccagttctttgatatagcgcggatcttctacggctatgtcataacgcacaccagaggcaatcaggatctttttaatgcctttcagatcacgcgcacggcgatagaggttgatcgttggttcgtggttcgtgtccatgtgcggacaaatatccggataaacgcagctcaaacggcgacaagtttgttcagcgcgtgggcttttgcagcgcaacatatacatgttggcagttggcccaccaagatcggaaatcacgcccgtaaaacctggaacggtgtcgcggatcgcttcgatctcattaatgatgctatcttcggaacggctctgaataatgcgcccttcgtgctcggtgatagaacagaaagagcagccgccaaagcagccacgcataatgttgacgctaaaacggatcatttcgtaagccggaatacgggcattgccataggccggatgtggcacgcgcttgtatggcagcgcaaaaacgctgtccatctcttcggtagaaagcggaatagcaggcgggttgatccacacatagcggtcgccgtgtttttgcatcaatgcgcgggcacagcctgggttggtttcgtggtgcagaatacggctagcatgggcgtacagcactttatcgcccttcactttctcgaaagaaggcagcaacacgtaggttttttcccacggtttcgggcgcggtggctgcacggttacggctttggcttcctgctttttcggtgccaccggtttgttatccgcgcacggcaaatcttcaccatacggatgcgggattgggtcgatttttccaggggtatcaagacgggtggaatccacgccgctccagccaggcagcgcctctttcacgataatcgcggtattacgcacatcgcggatttcactaattggctcgcccatcgccagacgatgcgccacttccaccagcggacgctcaccgttaccaaacatcagcatgtcggctttgctatccaccagcacggaacggcgcacggtatcggaccagtaatcataatgcgcggtacggcgcagactagcctcaataccgccgaggatcaccggtacatctttccacgcctctttacaacgctgggtataaaccagtgtggcgcgatccgggcgcttacccgcgacgttatccggcgtgtaggcatcgtcatgacgtaaacggcgatcggcggtataacggttgatcatgctatccatgttgccagcagtaacaccgaaaaacagattcggtttacccagacgcataaagtcgtctttgctgctccagtccggctgggcgatgatcccgacgcgaaagccctgcgcttccagcatacgaccgcaaatcgccatcccgaagcttgggtgatcgacatacgcgtcgccagtaaccaaaatgatgtcgcagctatcccagccaagttgatccatctcttcacgagacatcggcaaaaacggtgccggtccaaaacaggcggcccagtactgcggccaggagaacaggtcgcgatccggttggatcagggagatagagctcattttgcttccagaaatgataaaaaaataatcaaaggccggggattataagccggaacgaaagagaaatcgaaaggtattccatactcgccctcctcgggcgagtatgaagattacggtaccggattgaccaacagttgcccaatgctgccacggtccgccatttccagcgtctgactgttgaagtagaacgggaagtgcgcccaggaaggctgaccgaaataaacaagcagctccacttgtccgtcaacccaaacggtatctttccagcctctgtcttccgggaacggcatcgcgccattcacgttacggatctggaacattacgccttcaatatggaacgcttgcggctcgtccgcgcgtaccgtccagcgttcccacgttccttgctgcgcggtgacatcaatacggttgacgtcccacagctgtccattaatacccgggtcatcacccagactgatatcgcgactgcgaattgggctaccagccatgatttcagttggcagcaagcgcatcggaagactgtctgtgaccagcggcagaaggccggttgggcgcagcgttagcaccagggtagaaaccagaatactggatggctcaaagaagccacgaatacgatcaacaatgctcgccgcttcgccacaggtgatgctcacttcatcgccgttgctcatatccaccagaatctcgcggcgctcgcccggtgccaggctaagttgcttcacgcttacaggagcaggcaggaatccctgatcgccagaaatcacatgtaacgggcgaccatcgttcatctgtagttgatagcgacgagagttgctcgcgttcagcagtcgcaagcgcacccagccacggctgacttcaacgtacgggctttgtacaccgttaaccagcagcgtatcaccaacaaagccgccgcttcccggttcgttgtattctggcgtaccaaagttatccagccgtttatcctggataatgaccggaaaatcatccacaccataatggttggggataggcaggctcttgctgacttcatcttccaccagccacattccggcaaggccgttatagacctgctgagccgtgcggttgggagtattggcgtgataccacagagtagctgcgttctggcgaatgggcagtacgggtgcccagtcagcgtttgggctcatcatccgtgccggaccgcccatcagcgggcctggtacctgtagcccggccaccgtcatactgacattttctgtcaggcggttgctgtaaataagcttaacatcgtcgcccttccagacgcggatagtcggccccaggtaacgaccattgattccccagacgctcgcgcgtgtccctggcgtaaaactccagtgcgcacgttgtacagtcataaacagcggttgcccacggcgagattcaagtagcggcggaacgggtagcggttgctgttgcccggctgcgctggccttcaggggaacagcgcctgcacaaagtgcaatcccgcttgcctgaatgaactgacgccgactgagactcatatttgctccatgtaaaactggctaaagtaataccgtgcaggaaagtgttccccgcaaaaatacagattgccgacttaaacttttccggcggcttcgcgttctgcgacttctttatcgagctcggcgattttttgttccattatgctacgacaatgggcagccagctcacgaacctgatctttgccatactgactgacgtcaattggcggcagcatttcgacaatcaccagaccgttgtgcagtcgattaagattaatcttattgctagttgtagagacgcacacgggaataatcgggacgcccgccgcaattgccgcgtgaaatgctccagtcttgaacggtagcaggccgcgaccacggctgcgggttccttccgggaacatccagatggaaatacggcgttttttgaagtgattcactacttccgcaatggtgccgtgagctttagtgcgattgtttctgtcgatcaataagttgccggttaaccagtacaactgcccgaagaaggggatccacagcaagctctttttacctaccgtcaccgtcggcggttgcacgatgttgcttgctgtcaccatgtcatagttgttctggtggttagcgatatagatagcattgccgtagctttcagcgtctgtaggtttacggcactcaactttcaggccaaacagcggcgcaagacggccaaacatatgcccaaaggtggccacatgtttcgggttacgcgggctgaaaaggcagtaaatggagccgaatacacagactaagatgctgtaaatcacggtaataataagacgaaagatatatagcataacaccctctgaaggtctgagagactggcattgtacgtcacctgaaatcaggttagggcattgttaaaagccgctctctggaaaagcgtattgttaatcgcaacgcatgaataaacaacggtttcaagggaatttttatcgtttccgggggttgaatacgctgccggatgacgacttaacgtttcatccggcgttccttgcaagcgggaggaaacagcgccctccccggcatattactcttcgctatcaccgctgctggcacggcgaggagagtcgatctcaacacgatcgatacgctgcaaaccgcgcatcaacgtaccgcggcgtccacgttcgccagtgactttctgtaactcttccgggcgcagtttaattttgcgtttcccaacatgaatggtcagcgtgctttgcggcggcagaacgtacaattgcgccagaccatcttctccacgcgcggcttctgcgcttggaatgttgataatcttgttgcctttgcccttgctcagctgcggcagatcacttaccgggaacatcaacatacggcctgcctgagtgattgccagcagcatatcggaagcatcttcaatcaccaccggcggcataacatgggcattttccggtaaggtgatcaaagccttacctgcacggttacgcgccaccagatcgttaaaggtgcagacgaaaccgtaacccgcatcggaagccatcagcagtttctgatcgtcgctttccatcagcatatggtcaacggtcgccccaggcggcaacgttaatttgccggtgagcggctcgccctgaccacgcgcgctcggcagcgtaatcgggtcaatggcatagctacgaccggtggaatcaacaaacactaccggttggttgctcttacctttcaccgccgctttgaagctatcacccgctttataattcaggcccggcgcgtcgatatcatggcctttagcgctgcgtacccagcccatctggctcagcacaatggtgacaggttcagacggcagcatgtcgtgctcgctcatcgctttcgcttcttcgcgttcctgcaacgggctacgacgatcgtcaccgtaggcttgcgcgtctgcctgcagttctttcttcagcaggttattcattttacgctcggaagccaaaatgccctgcaactggtcgcgctctttttccagttcactctgctcaccgcgaatcttcatctcttccagtttggcaagatgacgcagtttcagttcgaggatcgcttccgcctgggtttccgtaaggccaaaccggctcatcagcgccggtttcggttcatcttcattacgaatgatctcaatcacttcgtcgatattgagaaacgccaccagcaaaccttcgaggatatgcaggcgcttgaggactttctccagacgatagttcagtcggcggcgcacggtatcgcggcggaacaccagccattcggagaggatttccagcaggtttttcaccgccggacgaccatccagaccgatcatattaaggttaatacgatagctcttttccagatcggtggtagcgaagaggtggttcatcacctgatccatatccacgcggttggaacgcggcacaatcaccaggcgggtcgggttctcgtggtcagattcatcgcgcagatcgtcaaccatcggcagctttttgttgcgcatttgcgcagcaatttgctccagtacgcgcgcaccactaacctgatgcggcaatgcgctgataaccaccgcgccatcttctttcttccacaccgcgcgcatacgcacactaccacgtccgttctcgtagattttacggatctcggcgcggctagtgataatttccgcttcagtcggataatccggcccctgcacgatatccagcagctgatcgagcgtggttttcggctggtcgattaatgcgattgccgcctgagccacttcacgcaggttatgcggtggaatatcggtcgccatgccgacggcaataccggtggtgccgttaagcaaaatgtttggcagacgggcaggtagcattttcggctcctgcaaagtgccgtcgaagtttggcacccagtcagccgtcccctgccccagctcgctcaatagcagctcggaatatttgctcaaccgggattcggtgtaacgcattgccgcgaagcttttcggatcgtccggcgcgccccagttcccctgaccatcaaccagcggataacggtaagagaacggttgcgccatcaggaccatcgcttcataacaggcgctatcgccgtgcggatggtatttacccagtacgtcaccgacggtacgggcgctttttttaaatttggcgctggcattcaggcccagttcagacatcgcatacacaatgcggcgctgaacaggtttcagaccatcaccaataaacggcaacgcacggtccatgatcacgtacatggagtagtttaagtaggcgttttccgtaaattcatgtagcgcaaggcgctctgccatatcgctcattaattctgattcctcaacttattcgccagccttcaaaggggcaatattgccggagatactacattatctgccgcgtcgagtcacaggagatcaacgtgaatagcgccgccggacgtgctccgacggcgataaaggcatcaatgtgccttgatatacaactctttgctgtagacataatcctggggattatgcagcggaaaaccgccaacgtagggtttaagcagtttgattaacggctgatagtagataggaatcagcggtgcctgttggttgatgatcacttctgcctgctgatacaacgcattacgctttgtcgcatcagtgatctgcgtggcctggtttagtaaggcgtcatactgcgcatttttccagtgaccgacgttttcttcactatcgcttttgagcgtgttcaggaagctggaagcatcattgtacgtcgcatcccagctctgccgagacagcatgaaatcaccggctcgtcgggcatcaagataggttttccactccattgtgcgcagcgtcacctgtgcacccagccattttttccattcggaagacaacgctatcgcggtcttttcatgcagatcgtacttgttgtagaacagctcaaagcgtagcggatgagaggcgtcgtatcccgcctgtttcagcaaggcttttgccatcgcgacgcgctcactcattggcttttgcagttcatcgaacgtcgtcgcgctaaagccttttacctctggcggcgtcagcgtggttgcgggcgttctcaaccccagtaccttttgcgcaataagctgtcgatcaaccgtaagatatagcgcccgacgcactcgcacatcgttaaatggcggtttctcaaggttgaagttgtaatattcgctgttcagacgcggaataattcgtagctcgccaggcagacttttttcaatggcgggaatttgctgcgccggaacccaggtgagatcgacctctcccgcgcgatagcggttatagccggtgacgctattatctagcgccagatactcaacctgttgcaatactgtatgttgcgcatcgcggtactttggatttttgcgtgcagtaatcttttcgttaactacccactgatcaagcacaaaggcaccgttgtaaaccatgttctctggcttactccagctatcgccatgtttagcgatgacatgatgaggaaccgggaacagcgtcggccaggcgagcatcgtcgtgaaccaaggaaccggctgctcaagcgtaacttcaagagtacgatcatccgtcgctttgacacccaggcttgtaacatctgctttacccgcaacaatagctgcggcattgttaatgtgcgcctgtgccagatagccagcaaaagggcttgccgttttcgggtcaaccgcgcgctgccagccgaggacaaaatcctctgccgtcagaggctgaccgtcggaccactgcaaaccgctacgcagatggaaaatatagcgcttgccgccgtccagtatctcccagcgttcagcctgagcgggctgcacctggccttcaccgtccatccataccagaccttcaaacagatccagcacaatctgcgcggcagtattctcctccaccttttgcgggtcgagcgtacctgggtcgctatgattgttgtaacgaaagacttgttgcggggcgagcggtgtgttggcgggaacgtcagcagcgtagagaggagccgcacttaccaggctgaccagccataataaatttcgcgtatacatggtattccttaccggagaaattataagcccaacaacaatacgcctgtggcattgttcgctcaaacttatcgcgagtgatttggctcacactccggtaaagaaaaaagcgagttgcccccgcttttccattaattaacggatttcattcaatagttctggatgcttatccagaacacgtaaaagtttgattgtggaaggatgaggttgggcattgcctttttcgtaacggctaaacgcatttacacctcccccaaaaatttcgcttgcctctttttgggtaagagagagcttttttcgaaccttcactataaattcaggtgccactgtttcggcattcacgctagcccgaaatgcctttacttgcgccatgaaagcatcactctcttctttattcatgatgctctcttcgcaatggacacaatataaaccgtggatacctttcaatactgtttttcgtccacggaaggtgtatggaatatctttaatgccagaaaccatttctccctggtggcaaaccggacatttcatattacttctccttaaagctgacgatcagtacgtcatgaattaccgtaattttaagataaacctggcctgtaacaagcctgggtctgtaaacatcctgccagatagtatgatcagagtaggtggtcatgcttttataaaagtcgctctcacttaatccaatgataacattacacataccatcaaaatccaaacctaactcatctgcatttaacagggcactacgtgttgtacgaacttgcccggcattgacaagttttttaacctgactcaaacgtgtatgtggtgtgcgtttttccataacccccgcctccctgttactttagttataacctaaaaggttaattacagcaatgaaaaagcacctaaaaggttagttagatgtacggagatagtgaccacacaaaacgtattctttaaggaaagtgattgaccatataagaaagtggcgcattagtagcgccagtttgaagcaggaatttataagggaagctggagtcaggcatcacgccaacggcacataaacatccgtttccagtcgctgctctgtcaccccttcggcaagattggtgtagtgaaacagaatcggtgctttacgcattttctcgccgcttgcaggcagccagtggcgaatgatgccccataccgtgtgactaatatcgtccagctcgccaacgtggcgggccacggcataacgtccaccggtaagttcaccattgctcacaccataacgattatcgggaatcggttcgctaacgctgccgcagatatcaaagcgaaacgcttccggtgcggtggtggcagggtcgtcccaggcgacgccaaaagtctggctttggttaacaggagaaagccccgtctctttacgccacatgataaatttcgccacgctgtagttgagcaattcagggctacagcggtgcggcaacatcgccacaggtatacttgggaaatcgataatgtttacatccagtgtcaggtttgtcattttgcctccctgcgaaattattcccgggaacgcgtcccgggagcggtaacaattacggatttactttgcggatctgtttgacgtcaatttcaacagaattccagtctttatcgacttcaccctgaatctcaaccgtatctttcggcgtcaccgtcacgccgttccagcgtttgtggtcgatatcaacattgatagtaccgctggcatctttgaacacgtagagatcgtcagagatgcgttcaacgatattgccgcgcagggttacccaggtgtcgtcacgcagggattttgcgctttctacagtcgttacgctgccgttcggcccctggaatcctccggcctgactttgcgttgcgcttgggccagaaaaaccgccctgctctgctgccatcaccggtgcgctgcacagggccattactgcgattactgctgcgaattttttcatgtttattactccctttaatgtctgtttccgagcatttaacaagatagtccttaacaacttcttaagggaaaaaaataaaatttagtgctgtacagagcgcgttacaacacggtttactggcagcaaatacggttatcgcagggatgaaaaaatgcgaattttactgatagaagatgacatgctgattggcgacggcatcaaaacgggccttagtaaaatgggttttagcgtcgactggtttacacaaggtcgtcagggaaaagaggcgctttatagcgcaccttatgatgcggtgatcctggatttaaccttaccaggcatggatggtcgcgatattttgcgcgaatggcgagaaaaaggtcagcgtgagccggtactgatcctgaccgcgcgcgatgcgctggcggaacgtgtagaagggctgcgtctgggagctgacgattatctgtgtaaaccttttgcgttgatagaagtcgccgccaggctggaagctctgatgcgccgaaccaacggccaggccagcaacgagctgcgccacggtaacgtcatgctcgaccccggcaaacgtatcgccacgctggctggcgaacccttaacactgaaaccaaaagaatttgccctgctggaattactgatgcgtaacgctggtcgggtactgagccgcaaactgattgaagagaaactgtatacctgggacgaagaggtcaccagtaatgccgttgaagtgcatgtgcatcatctgcgacgcaaactcggtagtgattttattcgtaccgtgcatggtattggttacacattaggtgagaaatgaaatttacccaacgtcttagtctgcgcgtcaggctgacgctaatctttttaattctggccagcgtgacctggctgctttccagctttgtcgcctggaaacaaacaacggataacgtcgatgaattgttcgacacccaactgatgctgtttgccaagcggttaagtacgctcgatctcaacgaaatcaacgcggcggatcgcatggcacagacgccaaatagattaaaacacggtcatgttgatgacgatgcgctgacctttgccatctttacccacgacggcagaatggtccttaatgatggcgataacggagaagatattccctatagctatcaacgggaaggttttgctgacgggcaactggtcggtgaagacgatccttggcgttttgtctggatgaccagtcctgatggcaaatatcgcatcgttgttggccaggaatgggaataccgtgaagacatggcgctggcgattgttgccgggcaattgatcccgtggctggtcgcactgccgattatgttaatcatcatgatggtactactgggtcgtgaactcgcgccgctgaacaaactggcgctggcactacgtatgcgtgaccctgacagcgaaaaaccactaaacgcgactggcgtacccagcgaagtgcggccactggttgagagcctaaatcaactgttcgcccgcacacatgcgatgatggttcgtgaacgacgctttacctccgacgcagctcacgaacttcgtagcccgttaacggcgctgaaagtgcaaaccgaagttgcgcagctctctgacgatgatccgcaggcgcggaaaaaagcactgctccaattacattccgggatcgatcgcgctactcgtctggttgatcaactgctcacgctaagccggctggacagtctggataaccttcaggacgtcgcggagatcccgcttgaagatctcctgcaaagcagcgtgatggatatttaccacacggcgcagcaggcgaaaattgacgtgcgactgacactcaatgcccacagcatcaaacgcaccgggcaaccgctattgctaagtttgttggtgcgaaatttgctggataacgccgtgcgctacagtccacagggcagcgtggtagacgtcacgctgaatgctgataatttcatcgtgagggataacggccccggtgtgacaccagaggcactggcgcgaattggcgaacgcttctatcgcccacccggacaaaccgctaccggcagcgggcttgggctaagcattgtccagcgaatcgccaaattgcatggcatgaatgttgaatttgggaatgcggaacaaggtggatttgaggcgaaggtaagctggtaacttctctgtctatgagagccgttaaaacgactctcatagattttattaatagcaaaatataaaccgtccccaaaaaagccaccaaccacaaaccagacaaataccgaggctgaatacatatacccaaaactcgaacatttcccgcataaagagttttcttaagataagaataataagtggcgtaagaagaaaaaatgctgcaatcattgcttgcaatatacgatcttcgccactaacggaaggtatactgcaaatatttcctccgctctcaagcatccagtcatacttattgaaagcaaaaaaagaatctattaaccaataagtaagcattatatatagcaatgcttcaaatattgttttaattttctgctttaacatatatcagtacgctcataaaaatccatttataattatcaacatgacacgttgatactttcatcttttacttattcaaagccatattttcaatccccaaaaaaaccgaaccaaacgtgtaaattattccggtgcgagtaagaattatgaggaatggctatcagtattgtcattttcagaaaatatttatcctgcatcggtgagtcagagtaagatcagacttttgctaaattcgcaaaagactttgcacattttgctaatttcaccgtaccgctctgtgacgtactatagtcggcaaacgtctcaccttgaggttaaaaaatgagcaacatcctgattatcaacggcgcgaaaaaattcgcccactccaatggtcaactgaacgacaccctgaccgaagtcgcggatggcacactgcgcgaccttgggcatgatgtccgcatcgttcgcgccgacagcgactacgatgtcaaagcggaagtacaaaactttctctgggctgatgtggtgatctggcagatgccaggctggtggatgggcgcgccgtggacagtgaaaaaatacattgatgatgtattcaccgaaggtcacgggacgctgtatgccagcgatggtcgtacccgcaaagatccgagcaaaaaatacggttccggcggcctggtacagggcaaaaaatatatgctttctctgacctggaacgcaccaatggaagccttcaccgaaaaagatcagttcttccacggcgttggcgttgacggtgtgtatctgccgttccataaagcaaaccaattcctcggtatggaaccgctgccgacatttatcgctaatgacgtgataaaaatgcctgatgttccccgctatactgaagaatatcgcaagcatcttgtggaaatttttggttaactagagctcaggctttagaaggagttaaccatgcttaccgtaatcgcagaaatccgtactcgtcctggtcaacatcaccgtcaggcggtattggatcagtttgctaaaatcgttccaaccgtactgaaagaagaaggttgccacggctatgcgccaatggtggattgcgcagctggcgtgagtttccagtctatggcaccggattctatcgtgatgattgagcagtgggaaagcatcgcgcatcttgaagcgcatctgcaaaccccgcacatgaaggcgtatagcgaagccgtaaaaggtgacgtgctggagatgaatatccgtattctgcagccagggatttaatcctgccttgtttgcccggccatcctgaccgggcaatgttctttcctttaaacctcaatctccgccatgtcgcctttctcttgcaaccagttgcggcgatcttcgctgcgtttcttcgccagcagcatatccatcatcgcgtcagtacgctgatcgtcttcatcatcgatagtcaactgcaccagacggcgagtgttcggatcaagcgtggtttcgcgcaattgcatcgggttcatttcccccagacctttaaaacgctggacgttcggcttgcctttcttgcgttttaattgctcaagtacgccctctttctcttcttccgtcagcgcgtaataaacctctttcccgagatcaatacggtagagcggtggcagtgcgacgtaaacgtgaccgtgtttcaccaacgcgcggaaatgttttacgaacaaagcgcagagcagcgtggcaatgtgcagaccatcagagtccgcatccgcgaggatacagattttgccataacgaagctggctcagatcgtcgctgtcaggatcgataccgatcgctacgctaatatcgtgcacttcctggctagccagcacttcgtcggaagagacttcccaggtgttaaggatcttacctttcagtggcatgatcgcctgatattcgcgatcgcgcgcctgcttggcagatccgcctgcggagtcaccttccacaaggaacagctcggtacggttaaggtcctgcgcggtacaatcagccagtttgccaggcaacgccgggccgctggtcagctttttacgcaccacttttttggccgcacgcatacggcgctgggcgctggaaatcgccatctccgccagcagttcagccgcctgaacgttctggttcagccacaggataaaggcatctttcaccacgccagaaacgaatgccgcgcattgacggctagagagacgctctttcgtctgcccggcaaactgcggatcctgcatttttacactcagcacataggcgcagcgatcccagatatcttccgcgctcagctttacaccgcgcggcagaatattgcggtattcacagaactcacgcatcgcgtccaacaggccctgacgcagaccattaacatgggtaccgccctgcatcgttgggataaggttgacgtagctttcggtcagcagttcaccgccttccggcagccacagtagcgcccagtccacagcttcagtatcaccagcgaaattaccgataaacggtttttccggcagcgtcggcagaccatttaccgcttccgccaggtaatcattcagaccgtcctgatagcaccagcgttgttcggtattgttgatctcatctttaaaagtgatctcaacgccagggcacaataccgctttggctttcagcacatgcgtcaggcgactaacagaaaatcgcgggctgtcaaagaaggtttcatccggccagaagtgcacactggtaccagtattgcgtttaccgcaagtgccgacaacctgtaaatcctgcaccttttcgccattttcaaaggcgatgttataaacctgaccatcgcggcgcacgttaacttctacgcgcttgctcagggcgttaaccacgctaatccccacgccatgcaggccgccagagaactggtaatttttgttagagaatttaccgcctgcatgcagacggcaaagaatcagttcaaccgccggtacaccctcttccgggtgaatatccaccggcatcccgcgcccatcgtcaataacttctaagctctggtcagcatgtaaaataacgtccacgcgttttgcgtgacccgccagtgcttcatccacactgttatcaatgacttcttgccccaaatggttagggcgagtggtatcggtatacatccccggacggcggcgaaccggctcaagcccggtgagtacctcaatggcatcagcgttataagtttgcgtcatggtttaagttagtaattcgagttgatcgtcagagatggtgcagaccaagaaaatcgacgatcgggttgaaataatcttcgaagcccgtgaatgcgtggttgccgccttctatgacagtctggcggcaggaagcgtagtacgccaccgcctggcggtaatccagcacttcatctcccgtctgttgcagcagccagatcaaatccggcgcttccagcgggtcaatctgcatgactttaagatcgtaaatatggcgactctctagcacatattgctgcccggtgtaggggttctcgttctgaccgagatagtccgtcagcagttcaaacgggcgcaccgccgggtttaccaccactgcgggcagcataaaacattgactcaaccaggtggcgtaatatccccccagactgctaccgacaatacccaggctatcaccgccatgttccaggacaatggattccagcagctctgccgcgtcggaaggatacggcggcaactgcggaatgatcatctcaacgtcagggtgatgttccgccagccagttttttaacaagctcgcttttgcagagcgcgggctgctgttgaaaccgtgtaaataaagaagcgtagacatcagtagccttcactagcggtatcaggttggaaacgtgtgtccgccaggcgatgcacctcggtggtcagcgtgccatcagcatgtaactcgagagtacgccagccgggcgcgatggtatccagcgtaaagttggaacagtgcggcttaaactgcacacaggtgctcggcgttgccagcaggcggcgaccattccagtcgagatccagctcctgatgaatatgaccgcacagcaagtatttgacgtgcggaaacttcgccagcacggtatccagttcgcccgcgttacgcagactgtgttgatcgagccaactacaacccgcaggtagcggatgatgatgcagcagcagcaacgtatggcgttctggcgcatcggccagtttacgttccagccactcaagctgaaactcgctcagctcaccgtgcggcacgccaaacacctggctatccagcaacaggatttgccattgctcaccaataaacacgcgcttcgccggggagatacccgcatcctgtaacgcgctgtacatcgcgggctggaaatcgtggttgcccggcagccagacgcagggcgcacgaaaacttgcgatgccttcagcgaaatgctgataggccgcagaggattgatcctgcgctaaatcacctgtcgcgacaatcaggtcgaattcgtgctggtgtggccgaatcgcctccagcaccgcctggtaactctcccaggtgtttacccctaacagggcttcgtgcttttgtgcaaacaggtgagtgtcggtaatttgtaaaatcctgactctggcctcaccagccagaggaagggttaacaggctttccaaatggtgtccttaggtttcacgacgttaataaaccggaatcgccatcgctccatgtgctaaacagtatcgcaaccagtccgctaaaaactgattaatttgatgcttttcgtcgcgttgatgcaactttttattaggataatcataccgcgctttgaagcgaaaaatctgctggctactacacacttcagccaccatcgcgtcatgatacagacgcaccgtcatactcggaaggctccagtaactgatcgcgggcgcagtctgttctattgtcaccagggtagtgtatcgggtgctttccacaatcgtcagccgatattgtgcgtttgccacctgatagcttacagtttcgccgggtgcgtcattgcgcggtaacaaacggcgcaattgactaaagttcatctcgcacaggcgcatcatttcaggaaagtcaggtgtgtaacgcttcatttatgcccactcattttttaacgcttgatgatgcagctgcagccattgcaaagcgatgacgctcgctgcgttgtcgattttcccctcttctacccactggtatgcctgttcccggcttaccacatgaacgcgaatatcttcgttttcatcagccagaccgtgaataccgcttgcggtcgtggcgtccacttcgcccaccataatactgctacgctcactggtgccccccgggcttgccaggaaacttaacaccggtttggtccgtttgactatcagtcccgcctcttcaatcgcttcgcgacgggcaacatcttccacactttcaccctcttcaatcatcccggcaaccatctccagtagccaaggggtttcgctggtgtcgtacgcggcaatccgaatctgctcaatcagcacaacttcatcacgcactgggtcaaagggtagcaagactgcggcgtgaccgcgctcaaaaatttcccgccgcacctcatgactcatttgcccgttgaatagacgatgacgaaatctataaagatctaaactaaaaaagccgcgataaagtgtttctcgtgcaataatttctacatcgtttttgccaaatgtaacgggcaggttgtctggcttaagcattgttaatgtcctggcactaatagtgaattaaatgtgaatttcagcgacgtttgactgccgtttgagcagtcatgtgttaaattgaggcacattaacgccctatggcacgtaacgccaaccttttgcggtagcggcttctgctagaatccgcaataattttacagtttgatcgcgctaaatactgcttcaccacaaggaatgcaaatgaagaaattgctccccattcttatcggcctgagcctttctgggttcagtagcttgagccaggccgagaacctgatgcaagtttatcagcaagcacgccttagtaacccggaattgcgtaagtctgccgccgatcgtgatgctgcctttgaaaaaattaatgaagcgcgcagtccattactgccacagctaggtttaggtgcagattacacctatagcaacggctaccgcgacgcgaacggcatcaactctaacgcgaccagtgcgtccttgcagttaactcaatccatttttgatatgagcaaatggcgtgcgttaacgctgcaggaaaaagcagcagggattcaggacgtcacgtatcagaccgatcagcaaaccttgatcctcaacaccgcgaccgcttatttcaacgtgttgaatgctattgacgttctttcctatacacaggcacaaaaagaagcgatctaccgtcaattagatcaaaccacccaacgttttaacgtgggcctggtagcgatcaccgacgtgcagaacgcccgcgcacagtacgataccgtgctggcgaacgaagtgaccgcacgtaataaccttgataacgcggtagagcagctgcgccagatcaccggtaactactatccggaactggctgcgctgaatgtcgaaaactttaaaaccgacaaaccacagccggttaacgcgctgctgaaagaagccgaaaaacgcaacctgagcctgttacaggcacgcttgagccaggacctggcgcgcgagcaaattcgccaggcgcaggatggtcacttaccgactctggatttaacggcttctaccgggatttctgacacctcttatagcggtagcaaaacccgtggtgccgctggtacccagtatgacgatagcaatatgggccagaacaaagttggcctgagcttcagcctgccgatttatcagggcggaatggttaacagccaggtgaaacaggcacagtacaactttgtcggtgccagcgagcaactggaaagtgcccatcgtagcgtcgtgcagaccgtgcgttcctccttcaacaacattaatgcatctatcagtagcattaacgcctacaaacaagccgtagtttccgctcaaagcagtttagacgcgatggaagcgggctacagcgtcggtacgcgtaccattgttgatgtgttggatgcgaccaccacgttgtacaacgccaagcaagagctggcgaatgcgcgttataactacctgattaatcagctgaatattaagagtgctctgggtacgttgaacgagcaggatctgctggcactgaacaatgcgctgagcaaaccggtttccactaatccggaaaacgttgcaccgcaaacgccggaacagaatgctattgctgatggttatgcgcctgatagcccggcaccagtcgttcagcaaacatccgcacgcactaccaccagtaacggtcataaccctttccgtaactgatgacgacgacggggcttcggccccgtctgaacgtaaggcaacgtaaagatacgggttatctgccgcattcttcccccttcagccttcaatttcgaccagccatcctctattctgatgggtatttaccactggtcccggaagacaaaaatgaaacggacaaaatccatacgccacgcatcgttccgcaaaaactggagcgcacgccatctgacaccagtcgctctcgcggttgccactgtttttatgctggctggctgtgaaaagagtgatgaaacagtgtctctctatcaaaatgctgacgactgtagtgctgcaaacccaggcaaaagcgccgaatgtaccaccgcgtacaacaatgcgctgaaagaagccgaacgtactgcgccgaaatacgccacccgtgaagactgtgttgctgaatttggtgaaggtcagtgccagcaggcaccagcccaggctggcatggcaccagaaaaccaggcgcaggcccagcaatccagcgggagtttctggatgccgctgatggccggttacatgatggggcgtctgatgggcggcggcgcgggatttgcacagcagccgctgttctccagcaaaaacccagccagtccggcttacggtaaatataccgacgcgacgggtaaaaactatggcgcagcccagccaggccgcaccatgaccgtaccgaagacggcaatggcaccaaaaccggcgaccaccactaccgttacccgtggcggttttggtgaatctgttgccaaacaaagcactatgcagcgtagtgcaaccggtacctcttctcgtagtatgggtggctgataccgatggaaagagtcagtattaccgagcgcccggactggcgtgagaaagcccacgaatacggtttcaattttcacaccatgtacggcgagccgtactggtgtgaagatgcttactacaagttgaccctcgcccaggttgaaaagctggaagaagtcaccgccgaactgcaccagatgtgcctgaaagtggtggaaaaagtgatcgccagcgatgagctgatgaccaaattccgcattccaaaacacacctggagttttgtgcgccagagttggctgacgcaccagccaagcctttatagccgtcttgatctggcgtgggatggcactggtgaacctaaacttctggaaaataacgccgatacgccaacgagtctatacgaggcggcgttctttcagtggatctggctggaagatcagcttaacgccggtaacttgccggagggcagcgaccagtttaacagtctgcaagaaaaactgatcgatcgcttcgttgagctgcgtgaacagtatggcttccagttgctgcatctcacctgctgtcgcgacacggtggaagatcgcggaaccattcagtatttgcaggactgcgcaacggaagctgaaattgctactgagttcctctacatcgatgatatcgggttaggtgaaaaaggtcagttcacggatttacaggatcaggtaatttccaacctgttcaaactgtatccgtgggaatttatgttgcgtgagatgttcagtaccaagctggaggatgcaggcgtacgctggctggaaccggcgtggaagagcattatctccaacaaggcacttctaccgctactgtgggagatgttcccgaatcacccgaacctgctgcccgcttattttgcggaagatgatcatccgcaaatggaaaaatatgtggttaaaccgatcttctcccgtgaaggcgcaaacgtgagcatcattgagaacggcaaaaccattgaagcagcggaaggtccgtatggcgaagaagggatgattgttcagcaattccacccgttaccgaaattcggcgacagctatatgctgattggtagctggctggtgaacgatcaacccgccggaattggcattcgtgaagaccgtgcattgatcacccaggatatgtctcggttttatccacatatttttgttgaataagccacgataccggatggcactcgccatccggtaattgttagcctatctgcacgctcagcatactcaggctgcccatttctataccctcaaccggaatggtaattggctcctgcccatcccacgcacctaacacatacaacaacggcaaataatgctctggcgttgggttgcttaacgtgccaccttcatggtcgaggtaattcaccagaggatgttgttccactggcccttgccacgtcagattcgctttcacatactcattaaagctcgtcgcccacggatacggactactatcaccgtgccacttcactgtgcgcaggttatgcaccacgttaccgctggcgaccaacattattccttcatctcgcagcgctgccagtttgcgccccatttcgaaatgccaggcggcaggtttgctactgtcgatactcaactgcaccatcgggatatcagcgtcaggatacatcttaatcagcacgccccagctgccgtggtcaaagccccaggcttctttatccagcgtcaccgggatcggcgctaacagctcaaccagacgctgtgccagcgcagggctacccggagcaggataatgcgtatcgtacagcgcctgcgggaagccaccaaagtcatgaatcgtgggcggcgtctccatcgcggtcactcctgttccacgggtaaaccagtgagcgctaaccaccacaatcgcttgcgggcgtggcaatgtcatccccaacttctgccagctgcgggtatacaaattatcttccagcacgttcatcggactaccgtgacctaaaaacaatgctggcatacgtgtactagacatgatgatatccttaactaaaggtgtcattttgatatcctcacaatacgcttgttcggcggagtaagaacccggataacaatgatgatgatcatcagttattttgacgatctgcctgaaggtgaagatttataaggagttgtcgatgagtgtacctctcattctgaccatactggcgggggcagccacgtttattggcgcgtttctcggcgttctcgggcaaaaacccagcaaccgcttactggcgtttagcctaggttttgcggcggggatcatgttgctcatcagtttaatggaaatgcttcctgccgcactagcagctgaaggaatgagccctgtgttgggttatggaatgtttatcttcggtctgcttggctattttggcctggaccgcatgttgccacatgctcatccgcaggatttaatgcaaaaaagcgtgcagccgttgccaaaaagcatcaagcgcacagccattctgctcactctcggcatcagtctgcataacttcccggaagggattgccacctttgtcacggcgagcagcaacctggagctgggatttggcatcgcactggccgtcgcgttgcacaatatccctgaaggtctggcagtggcaggcccggtttatgcggcaacggggtctaaacgcaccgcgattctgtgggcggggatttctggactagcagaaattcttggtggtgtgctggcgtggttaatcctcggtagcatgatttccccggtggtcatggcggcaatcatggcggcggttgcaggaattatggtggcgctcagcgttgatgaattaatgccgctcgccaaagagattgaccctaataataaccccagctatggcgtactatgtggaatgagtgtgatgggattcagtttagtgctgctacaaacggcgggaattggttaaaaacaacatcagaagttgtccagcgcatggacaacttctgccagcttcacgaaagccttattctaccttttcggctgtctcttctctcgtactgtttaagtatttgttccgcgcttcaagcagtgcgtctctgtcctggcgaaacgcccgacaataacgtttcaaatgcaggaaataacccaccacaaccagagcaatcaatacaatccagtaccaggcgataaacatccttttacccttaatatttaacaatactaaacatttagcgtataaatttcacatatcctttttcggatatattcatatggtcgcataataacggaacaattatatgattttgatcataatgaaaaagaatgcctgatattaatgaaattttctcatagaaagagaagcggaattaacatcttgcatagcagggaaaaataaaaaccgaagcctgctacaacttcggtttcttgattaaggcagtaaattaagcagcggttttcagctggctttacgctcatgtgcctgacggtatgccaccaggtcttcaatagtcacgagcgccatattgtgtttattggcaaactcaatacactctggtgcacgcgccatcgtgccatcgtcattagtcagctcacacagtacaccagccggtttaaagcctgccagcgtcatcagatcaatagttgcttcagtatgaccgccacgcgtcagtacaccacctgcctgagcgcgaagtgggaaaacgtggccaggacgattcagatcactcggttttgcgccatcggcaatcgctgcgcgaacggtcgtaatacggtcagcggcagaaacaccggtagtcacaccttcagctgcttcaatggtcacggtaaaaccggtgccataggcgctggtgttattttctaccatcattggcagatcgagttgtttacggcgatcttcagtaatgcacaggcaaacaataccgctaccgtggcgaatggtcagcgccatctgctcaacagtcatggtttctgccgggaagatcatatcaccttcgttttcacggtcttcatcatcaagcaccattacaccgcgtccttcacgcagcgcagccagtgcattttcaacacgttcgaaaggcgtaccaaaagaggaaagtagcgtctgattcatggtaaaaaaacctcactaaaattatggttaccagaatcagggcagtcttaggagtggcggcatatagccaaaataacgtgagcgggtccatgcccgacagaatcgttactctctcccatccggactctaaccgtcggccccggaattacaccggatctgctgtcctttgagttcgcacccaaagcgctcgcgggctttcaactgagttgatttaccgccggtggggaatttcgccccgccctgagaataagcggattcactataacgctaatgattagcggcagcaacgcatagcttcacataattctggtttatatctaatacaaacactaaaacgggccatcaggcccgttatatcagtgctctaactccagctctcttgcctgcatcatctgttgacaataccaggcataacgtgcgcaaaaccaggttctatgttcttcatccatgttaccagtaacggccagaatatcgaccgggcgaccttctgcgtgcattctggcaaaactacgcgccaggaaatcgaaattatttaaagaattaagactatgatccataagcacatcctccggttatcgcataccttttaaggccatatgctttttctgatttcagtattccccaatcagtgtagtgcctttaaacataacgtgcgtaaatatattgtccccgatcacactttttagtgaaaaataaaaaaccatattaaaagactttctcttccagaacttctctaacctgtgttattattaacacagataaatgtaagcaaggaaactattacaaagtaaatattgcgtcactaaatggacattggagtgatatatgattttattcgccgactataacaccccttatcttttcgctatttcctttgtactgttgatcggcctgttagaaatttttgcgcttatctgcggtcacatgctctccggtgctcttgatgcacatcttgaccattatgattctataaccacaggtcatattagccaggcacttcattatctcaatattggaagattgccagctctcgtcgttctctgcttactggctggtttttttggtcttattggcatcctgttgcagcatgcctgcatcatggtctggcaaagtccactgagcaacctgttcgtggttcctgtcagtttactgtttacgattattgcggtgcattataccggtaaaatagttgcgccctggattccacgcgaccatagtagtgctattacagaagaagaatatattggtagcatggcgttaattaccggtcatcaagccactagtggtaatccctgcgaaggaaaactcaccgatcaatttggccaaatacattatttactactggagcctgaagaaggaaaaattttcactaaaggagacaaagtgttaattatttgccgactttctgcaacgcgatatttggcggaaaataatccctggccccaaatattgtaatttattaatcaaaaggaaatttaataatggatgatattgttaattctgtgccctcctggatgtttaccgcaattattgccgtatgcattctgtttattattggaattattttcgccaggctctatcgtcgcgctagcgcagagcaagcttttgttcgtactggtttaggtgggcaaaaagtggtaatgagcggtggcgcaatcgtgatgccgatctttcatgaaataatccccatcaatatgaatactctgaagctggaagtcagccgcagtaccattgatagcctgattacgaaagatcgtatgcgcgtcgatgtagtagtcgctttctttgtgcgggtaaaacctagtgtagaagggattgccaccgctgcccagacgctggggcaacgcaccctgagccctgaagacttacgtatgttggttgaagataaatttgtcgatgccctccgtgcaacagctgcgcaaatgaccatgcatgagttacaggatacccgcgagaactttgtgcagggggtgcaaaatacagtggcagaagacctgagcaaaaacggtctggaactggagagcgttagtcttaccaactttaaccagaccagcaaagaacatttcaatccgaacaatgcctttgacgccgaaggtttaaccaaactgactcaggaaacagagcgccgtcgccgcgaacgtaacgaagttgaacaggatgtagaagttgcggtgcgtgaaaaaaatcgcgatgcgctaagccgcaagctggagattgaacagcaagaagcgtttatgacgcttgagcaggagcagcaggttaaaacccgtactgccgaacagaatgcacgtattgcggcttttgaagctgaacgtcgtcgtgaagcagagcagacacgaattctggctgaacgacagattcaggaaacagaaatcgaccgcgaacaggccgtccgcagtagaaaggttgaagctgaacgtgaagttcgcattaaagagatcgaacagcagcaggtcaccgaaatcgctaaccagacgaaaagcatcgctattgccgccaaaagcgaacaacagtcccaggcagaagcgcgtgctaatctcgcacttgcagaagcggtaagcgcccaacaaaacgtagaaaccactcgccagactgccgaagccgatcgtgctaaacaagttgccctaatcgctgccgcgcaggatgcagaaaccaaagcggttgaactgaccgtgcgggcgaaagcagaaaaagaagccgcagagatgcaggcggcggctatcgttgagttagccgaagctacacgtaaaaagggtctggcggaagcagaagcacaacgtgcgctgaacgatgctatcaacgtactttctgatgaacaaaccagccttaaattcaaactggccttgttgcaggcgctgcctgcggtaatagagaaatccgttgagccgatgaagagtatcgacggtatcaagattattcaggtcgatggtctgaatcgtggcggcgctgcgggtgatgcaaacacgggtaatgtggggggcggaaacctggcggaacaagcattaagtgccgctctctcttaccgcacacaggcaccgctgattgactccttgctcaatgaaattggcgttagtggcggcagtctggcggcattgactagtcccttaaccagtacaactcccgtcgaagaaaaagcagagtaaaccctcttccaggaataatccctggcccaaaaagccggggattttttatatctgcgttccgctaaaaagtgcaaatgatcaggttgttgcagcattttgcgtgacggctcggggaaggcaaaactgcatcagagaaagcattgcgtggggtctggcgctcatcaacaatcggggagtcagcagggggctgaaacgggaaagcccctcccgaagaagggggccttacagaaggaaagggttatgatgaagctcgtcatcatactgattgtgttgttactcgtaagtttcgcagcttattaacagccaatcagaggggggagaaatcctccctcacccttgttcctttactttaggttgaaaaaaaatcagcgtcaagaaggtttcattaacacatatccctggcccaaaaagccggggattttttatatctgcgttccgctaaaaggtgcaaatgctcaggacgttgcagcgttttgcgtgaccgctcggggaaggcaaaattgcctctgggaaagcattgcgcggggtccggcgctcatcaacaatcggggggcagcaaggggctgaaacgggaaagcccctcccgaagaaggggccttgtataaggaaagggttatgatgaagctcgtcatcatactggttgtgttgttactgttaagtttcccgacttactaacaactcatcagaggggggagaaatcctcccttacccttgttcctttactctaggttgaaaaaacaacagcgtcaataggcctgccatgtacgaagcgagatctgtgaaccgctttccggttagccttttttatcctgttggatcttcttgatgatgttggtcgtgctgcaaccgtcttcaaagttgagcaccaacacttcgccaccgttggcccagacttctttactcccggcaatctcttctggtttatagtcgccgcctttcaccagcagatctggcaagatcccggcgatcaagcgctgcggcgtgtcctcttcaaagctcactacccagtcgaccgcttccagtgcgcccagcacaatcatacgctgttcgagtgggtttaccgggcgggaatcccctttcagccgtttggtggaggcatcgctgttgacggcaacaatcaagcggtcacccagcttgcgggcatttgccagataagagacgtgcccggcgtgcaggatgtcaaagacaccgttggtcatcaccactttttcaccacgtttacgcgctgccgctacggccagcttcagttcctcttcggtcatcacgccaaagcctgtatctgcacgtccacgtacagcattttccagctcgatcgggctaaccgtggaggttcccagtttgccgaccaccacgccagccgccgcattggcaaagaagcaggcttcttccaggctattacccgctgccagcgttgccgccaggacgccaatcaccgtgtcgcccgcaccggtaacgtcatacacttcctgcgcttgggttggcatatgcagcggcgctttacccggttgcagcaggctcataccctgttcggaacgggtcactaacagagcgctgagttcgtaatcggcaatcagtttcatgccgcgctcaacaatctcttcttcggtcttacatttaccgacaacagcttcaaattcgctgagattcggcgttaacagcgtagcgccgcggtagcgctcaaaatcggtaccttttggatcaatcagcaccggaacacccgctttacgcgccagttggatcatctgctgtacgcttgccagcgcacctttggcgtagtcagaaagcaccagcgcgccaatgctactcagcgcctgattaatccgctcgtgcagcggctgcggatcaacaccttcgaaaccttcttcaaaatccagacggatcagctgttggttgcgggaaagtacccgtaatttggtaatggtcggatgcgtcggtacagaaacgaagtcgcatttgacgttgacgtcggccagagatttactcagcgcgcgcgctgcatcgtcaatgcccgtcaacccgaccaggcgtgcattagcaccgagagaagcgatattcatcgccacgttagccgcgccgcccggacgttcttcgatggtattcactttaaccacgggcaccggcgcttccgggctgatacgactggtggggccgtaccagtaacgatccagcatcacatcaccaaccaccatcactcctgcacgttcaaactctggcagcgttactttcattcctgtctcctgagagattcaaaatttgcgcgcgataataccatacttcattcttccaccagccacttctgccagcttgcccgcaccagttcacgctctgcggtgaagcaatcctcgctcacatggcccggcaattcctgtaatgccagatgatgaagttcatcgcgaagcgtagtgtaagcacgggtcagcgccatcgcttcctgctcttccataatgtcgttttgcgccagtagttccagaatacgcacgttgtcactccagcgcgttaacttcggtttttcatgagcgtagcgcaacaccagatattgggtaataaattcgatatcggtaattcccccttcatcagctttgatatcaaagcgatcgcgatgtttattgccgagatgagcgcgcattttctcgcgcatttcccgcacttccgtttgcagagttttaccttcacgcggcagcgtcataatctcgcgacgcactgcgtcaaagtgcgcggtgagctgcggatcgccgtacactacacgcgcacgcaccagcgcctgatgttcccacgtccaggcctcgtttttctgataatcggcaaatgcttctgcggatgtcaccagcattcccgccgccccggacggacgcagtcgagcatccacttcatacaaaatgccggaagaggtacgcgtactgaacagatgcataatgcgttgcgccagacgcagataaaactgccgcccgtcgatttcccgctcaccgtcagtcatcgcatccattgggcaatcatggaggaagataaggtcaagatcggaactgtagcctaactcccagccgcccagcttgccgtagccgaccaccgcaaaaccacgcccttcgcgttcgttcaggtgattcggcttaccgtagcgggcaaccatttgaacccacgcctgctgaacgacggcatctatcatggcttccgccagccaggttaagtgatcgctcactttcatcaccggtagcgtaccggcgatatccgctgcggcgatgcgtaacagctgcgcctgtttgaactgacgcagcgcctcaagctgttgctcttcgtcatcttccggcacgcgcagcaaatactggcgcaactcatcgcggtaggcatcggtcgccgtcggctggtaaagggtgtttggatcgagcaattcatccagcaataatggataacgcgccagctggctggcaatcatcgggctcgcggcacacagagaaatcaaatgtttaagcgccgcggggaattcactgagcaattctaaataggtggtgcgggtaacaatccccaccagcaaggcggtaatgcggctcagcgtaacggcagcgtcttcacgcgcacagacatcacttagcagatgcggcatcagatggtcgagcacctgacgtcctcgcggcccgatggtgcgcttatccagctctttgcggaaatcggcaatcagcgttagcacctgtttgcgatcatcctcgctaagatgcgccagcactggcgtagtgtcatcttcctgcaacgcatcctgccacagctcacgccactgttcgctcaggctctcttcctgagtttcactttcatcgtcgccaatcaattcattaaacacccggcgcacattggtcatatgtgcggtcagcgccccggtcagttgcggccagtcagcaaagtccatcgcccacgccagccgcgcacgattaagctcatcagaaggaagcgtctgggtttgttcgtcgttaatgctttgcagcaggttttccagacgccgcaggaacagatacgccactcgcaattgttcagcatcgttttcagaaagcagatgcagctcggcaatggcgctgagcgttggcagtaaagagcggctttgcaggctcggttcgcgtccgccgcgaatgagctggaacacctgaacgataaattcaatttcgcgaatgccgcctgcgccgagtttgatattgtcggtcaaaccacgtcgacgcacttcacgggcaatcatccctttcatgttgcgcaggctctgaatcacgctgaaatcgatgtaacgacggaaaacaaacgggcgcagcatcgcacgcaactcgttagcatagacgccttcgctatcgcccataatccgcgccttgaccatcgcgtaacgctcccagtcgcgcccctgctcctggtaataatcttccaacgcggcaaagctcagcaccagcgggccactttcgccaaacggacgcagccgcatatccacgcgatagacgaagccatcctgcgttggttgatccagcactttaatcagccgctgccccatgcgggtaaaaaactgcgcgttatccagttcccggcgtccaccctgcgtacaaccatgttccggccaggcaaaaatcagatcgatatcagaggagaaattcagctccccaccgcccagcttacccatgcctaaaatcagcagcggttgcgcttcgccctgcgcattgcacggcgttccccactcgcggcagcaggcgtcatacagccagtcacgcgccgcaacaatcagcgtctccgccagatagctgagctgctgcaatatgctctcttcagtaaccagtgccagcgtttgcgcccaggcgatgcgcaccataatgcgccgccggaatagccgcagctcgcgcattaacccggcttcgtcactcacattacagagcgcctcctgcaaccatgccgcgtaatgctgccattcgtcggcctgcggcggttggctttccagttccgtcagccactctggatgcgcaatcacgctgtcctgcacaaaatcactaaaagtaagtacactcttcgcctgtgcgctaagactttcctcggctaaaggctctggcagccgctcaacaacggtctgccagtactgctgtaacggactagagagcggcttcataagcgattttatccttgcctgattaacgttttccgctgtgcaaccagaacggttcctgattgtttgcctcattacggaaatgttcaatttcgatgcgttgcccggtcgcaatagcgtgatgcagcccctgccagttctccagccaggcttgcgcgacgacaggatcatagtaacccgccagcaacagtatactgtcaatatcacgcgtcaggcgtggcaactggtcacggtagcgatcgcctaacggctggcagaaaacgcttttcagttcagcggcatggcgggaaagatggatatcggcaaagcgtttgaaggagtcgctgattttgccctgcgctttggcatctaaaaatggctgccatgctttgcttaccaaccattcggtcaacgccagcttcgccattgccgtttcggtagagtagaccgccgtcacggcagacaccgcagaagcaatggtcgcctcgcattgagtcagcagatcacgtaagtgagtgctcgctttacgcggcacaataccaccgaacagcatcagcgtatgacggaccaggctaatggctgccagcacctgttctttcgccgcatcgttgccgcgtacccacagttcttcatgatactgccattgcgctaacgccagctcgagcgccgcttccagcccctgttccacatcggcttttgccgcaacatgcaaaatggtggtcggtttgatttcacgcgccggattgccctgcgccagatgatagccacgcgccgctttgctcaggctgccctggcgtaatccggtttggcttaccagttggttcgccagtttcagcaccgcgcgcgtgtcgccgctaagcagttccagttccagctcacagataggttcagcaaattcacccgctttcacttccccctggtcgagggcgatttcaatttggctaccatcgaccgccaccagccatttttcgcgataaaaatcggtgctgaacagcggctgcacgcgggaggcgagatcggcgggcaattcgccgttcggccagacttccgtcggtaactgcgccaggtcgagcgtcggttcgctcaacgccacgttatattccgggcgctgatgtaagccgcctgtcactcttcctgcaactttcatggtcatctcatagcgaccgttttcgccacgaatacgtaagcccatatcgtgcccacgcagccagttatccggcgtttcgtagtaaatattcagcaactgcacggggtcatggtgctcgccgcccagcgtattgagatggtcacgcaacgcctcaacggcactgtgattaacaataaactttaattcgatttcctgagccatggcctttacttatcggttatgtcacataagtgacgatgaacggcgaacttaatgcgatcttttttgtcagtagatagtattttgcgccaaattgccatgcaacgggcaatttgacgggcgtaaaagtttgaagcagtggcaagacctgacacagaggattccgattgatgtcgaatgctttgcgtagcgacactgatgccactactatcgttccactttccatgacaataacgacagcctgatgccaaaattacgcctgatcggattaactttactcgcacttagcgcgactgccgtcagtcacgctgaagaaacgcgctatgtttccgacgaactgaatacctgggtccgcagcggtccgggagatcattatcgcctcgtgggcacggttaacgccggcgaggaagtgaccttattacaaactgacgccaacaccaattatgcccaggtgaaagacagctctggccgtaccgcctggatcccgttgaaacaacttagcactgagccaagcctgcgctcccgtgtgccagatctggaaaatcaggtcaaaaccctgaccgataaactcaccaatatcgataacacctggaatcagcgcaccgcagaaatgcagcaaaaagtggcgcagagcgacagcgtgatcaacgggttaaaagaagaaaatcagaaactgaaaaacgagctgattgtcgcgcagaaaaaggtcgatgccgccagcgtacagctggatgacaaacagcgcaccatcatcatgcaatggtttatgtatggcggtggcgtgctggggcttggcttgctgctcggtctggtactgccgcacctgatcccaagccgcaaacgcaaagatcgctggatgaactaaatcgccttcttcgttgcactgtcttattattaggaattgtgtatttgacgaagggatgatggcgtgaagatttatctggtcggtggtgctgttcgggatgcattgttagggctaccggtcaaagacagagattgggtggtggtcggcagtacgccacaggagatgctcgacgcgggctaccagcaggtaggccgcgattttcctgtgtttctgcatccgcaaacgcatgaagagtatgcgctggcacgtaccgaacggaaatccggttccggttacaccggttttacttgctatgccgcaccggatgtcacgctggaagatgatcttaagcgtcgcgatctgaccattaatgcgctggcccaggacgataacggcgagattatcgacccgtacaacggtctgggcgatctgcaaaatcgtctgttgcgccatgtttcccccgcttttggcgaagatccgttacgcgtattgcgcgtggcgcgttttgctgcgcgttatgcccacctcggttttcgtattgccgatgaaactctggcgttgatgcgcgagatgacccatgcgggtgaactggaacacctgacgcctgaacgggtatggaaagagacggaaagcgccctcaccacccgcaatccacaggtgttcttccaggtactgcgcgattgcggcgcactgcgcgttttattcccggaaattgacgcactgtttggcgttccggcccctgccaagtggcatccggaaatcgatacgggtattcataccttaatgacgctcagtatggcggcgatgctgagtccgcaggtcgatgtccgtttcgcaactttatgccacgatctcggtaaagggctgacgccgccagaactctggccgcgtcatcatggtcatggcccggcgggtgttaagttagtggaacaactatgccagcgtctgcgcgtgccaaatgaaattcgcgatttagccagactggtggctgagtttcacgatctcatccacaccttcccaatgctgaacccaaaaaccatcgtcaaattatttgattccatcgatgcctggcgtaaaccgcagcgtgtcgagcaactggcgctgaccagcgaggctgacgtgcgcggcagaaccggttttgaaagtgcggactacccgcaaggccgctggttgcgcgaagcctgggaagtggcgcagagtgtgccgacaaaagccgtcgttgaagcgggatttaaaggtgtggagattcgcgaggagctgacccgacggcggattgcggcggtagccagctggaaggaacaacgttgcccaaagcctgaatgagtattgggcattttgccggatgcggcgtaaacgccttatccggctacatgtcaacgacagttgtaggcctgataagacgcgcaagcgtcgcatcaggcgttgattgccggatgcggcgtgaacgccttattcggcctacgcaatcgttgacaacgccaagcatccgacactattcctcaattaaaagaacacgacatacaccgcagccgccacaataaagcgataaatggcgaacgggataaagctaatgcgcttaatcaattgcaggaaggttttaatcgctatcagcgccaccacaaaagcggtgataaacccaacggcaaacatcgggatatcgccgcttgtcaggaagccccagcttttgtagagatcgagcgccgttgcgcccatcatcatcggcaccgccagcaggaagctaaactcggaagcagcgtaacggctcacccccatcagcatcccaccactaatggtcgccccggaacgggagaaacccggccacagcgccagacactggaaacagccaatcataaatgcctgacgataggtcatatcatcaagacccggcgcacgcggctctttcggcttcaggcattcggcggcaatcagcaacaaaccgccaacgaccagcgcatacatcacatttatcgggttaaacaaactcttaatcgtgtcgtggaacaacagccccaataccaccgccggaatcatccccagcaaaatgtggatcagcgttaaacgacctttgctttcaccttcgtgctgcaacgggcggccaaagtggatgccaatcaggccaaacagacgccgccagaacatcactactaccgccagaatacttcctaactggatcacaacttcaaaggttttcgccgtgtcgccctcaaaccccaacaagtgaccgacaataatcatatggcccgtgctggataccggcagaaattctgtcaatccttcgaccacacccaatattgccgctatcagcaggctgtgcatatcgctcatcaataaacccctaaattattaaaatgtaccgcttgtccgaactactgcgtatgaccaggttataaccgtttggtttaacagctgtaaaattaattattttctttcagattattgccacgctcaatgattacgccaacattcgccgcccgcgccactgcgcctggcttgctgagtttgatacgcacccacgggctgttgaagcgtgctaacagcagctccgccacctcttcagccacgcgttccaccagcgcaaaacgcgccccctcgacgtggctgaccaccgtttctgcaatgtcagcgtaactgaggcaatccgccacatcatcacttttcgccgctttacggttatcccacgccatttcgatatcgaacactaacttctgttcgatggtctgttcccagtcgtaaacaccaatagtggtgattacgctaagttgctctataaatacaatatccatcacgtcctgcctgctttttggctaaccggataccacttccggcgaaatgtgcgtattatccacagattcatcgttgaacacgaattttcaaaacggaacagcttatgagtgcaatcgcgcctggaatgatcctcatcgcgtacctctgcggctccatttccagtgccattctggtttgccgcttgtgtgggctgcccgatccgcgaaccagcggctccggcaatccaggcgcaaccaatgtgttacgtatcggtggcaagggagcagccgtagcagtactgattttcgacgttctgaaaggaatgttgcccgtctggggcgcgtatgaattaggtgtcagccccttctggctaggcttaattgccatcgccgcctgtcttggacacatctggcccgttttcttcggatttaaaggaggaaaaggcgttgctaccgcttttggtgccatcgcacccattggctgggatctcaccggagtaatggcgggaacctggttactgaccgtgctattgagcggatacagcagcctgggagcgattgtcagtgcactgattgctccgttttatgtctggtggtttaagccacaattcaccttcccggttagcatgctctcttgcctgatcctgctgcgtcatcatgacaacatccaacgtctgtggcgtcgtcaggagacaaaaatctggacgaaattcaaaagaaagcgcgaaaaggatcccgagtgatttctggtggatttacatgacctgatagccttcatcgggcttgcccagccgttgctggcaccatgccgccagaaattccacgcagacacgtaatttcatgctgcgatagagcggctcccggtaaacagcccagatattggcgctttgtgcatactctggcaatacttgcaccagtttgccactctccagaaacggcaacacatcccactcggaacgcagcataatccctttgccctccagcgcccattgcagcacaatctcgccgctattggaggaaagatgcccgcttaccttcacgctttttttctcctgaccgttccccaactcccatattccatgggtcatatcgcgctctttggtcaccagacagtcatgacgacttaattcctgtagggattgtggctgcggatatttttgcagatactcaggtgctgcgcataatattcttttattttttgtcaaaagatgcgcaatataataatcaggaatttcgtcattaatacgaatatccagatcaatattatcctgcactaaatcaatttgccgatcgaacaattcaaaatgcacctgtaactcaggataattgcgcatcagttcggtaatagctggcgcaatatggctgcgcccaaaaccaaaactgcaaccaatacgaatcatcccctccgggcgcgttttgatttgcgtgacgtcatcgaccagtcgctgatattgggtgaggatttccaacgcatgttcgtaacaacgttggccactttcagtcagcgccacgccgcgagcggagcggttcagcagcgttgttgccagcgtattttcaaggatttggatccgcttggtgacaaatgcaggcgtctgcccaagcgtcgccgctgcggcgctaaaactcccgctgtgaacgatttctaccagtacctgcaagtctttggctaaaggccagctattcagcatcgttaattatccgcagttgtgataagcgcagtgtatttcgcaaaacattgccattccctgctctggcgcaatattcattcttattttcgcgttgattcacgaactgttaattacatattcacggtggcaaaaaatataaaaccacatttttagtggtagtttgtggcggtgaatttttccagacaaatacaaaaactggagttgccatgatgagcgaaagtaataagcaacaggcagtgaataagttgacagagattgtcgctaactttaccgccatgatttctacccgaatgcctgatgacgtggtggataaactaaaacagctaaaggatgccgaaacgagcagcatggggaaaattatctaccatacgatgttcgacaacatgcaaaaagcgattgacctgaatcgtcctgcctgtcaggacaccggggagattatgttcttcgttaaagtcggttcccgcttcccactgcttggcgagctgcaaagcatactcaaacaagccgtggaagaggcaaccgtcaaagcgccactacgtcacaatgcggtagaaatttttgacgaagtaaacaccggcaaaaataccggtagcggcgtaccgtgggtcacctgggacatcatccccgacaatgacgatgcggaaatcgaagtttacatggcaggcggcggctgcacgctacctggccgcagcaaagtgttaatgccgagtgaaggctacgaaggcgtggtgaaattcgtcttcgaaaatatctccaccctcgccgtaaacgcctgtccaccggtactggtgggcgtgggcatcgccaccagcgtggaaaccgccgccgtactcagccgtaaagccattttgcgcccgattggcagccgccatcccaatccaaaagcggcagaactggagctacgcctggaagaaggactcaaccgtctggggattggtccacaagggctgaccggcaacagtagtgtgatgggcgtacatatcgaatctgccgcccgccatccgagtaccatcggcgttgctgtctctaccggctgctgggcgcatcgtcgcggcacgctgctggttcatgccgatctcacctttgaaaatctgtctcacacccggagcgcgttatgaaaaagatcctgacaaccccgatcaaagctgaagatctgcaagatattcgcgtcggcgatgtgatctacctgaccggtacgctggtgacctgccgcgacgtttgtcaccgccgtttgatcgaactgaaacgtccgatcccttacgatctcaacggcaaagcgattttccacgctggccccatcgtgcgcaaaaacggcgacaaatgggagatggtctccgtcggcccgacaaccagtatgcgtatggaaagttttgaacgtgaatttattgagcagaccggcgtgaaactggtggttggcaaaggtggtatggggccgctgaccgaagaaggctgccagaaattcaaggcgctacatgtgattttcccggcaggctgcgcggtgctggcggcaacccaggtggaagagattgaagaagtgcactggacagagctcggaatgccggagagtctgtgggtctgccgggtcaaagagttcggcccgctgattgtctctattgatacccacggcaacaacctgatagccgaaaacaaaaagctgttcgccgaacgccgcgatcccatcgtggaagagatctgcgagcacgtccattacatcaaataaccctcccggagaggctcacccctctcctttttcgcaggcataacacgatgaaaccttccactgaatggtggcgatatcttgcgccgctggcggtcatcgccattattgctctacttccggttcccgcagggctggagaaccatacctggctctactttgccgtttttactggcgtgatcgttggactgatcctcgaacccgtgccgggtgccgtggtggcgatggtgggtatatccatcatcgccatactctctccctggctgctgttcagcccggagcagctcgctcagccaggctttaaattcactgcaaaatccctcagctgggccgtttccggtttttctaatagcgttatctggctgattttcgccgcctttatgtttggcacaggctatgaaaaaaccgggcttggacgccgcattgcgctgattctggtgaaaaagatgggacatcgcacgctgtttctcggctatgcggtgatgttctccgagctgatcctcgcacctgtaacaccgtccaacagcgcgcgtggtgcggggattatctatcccatcatccgtaacctgccaccgctctatcaaagtcaaccaaacgacagcagtagccgcagcattggcagctacatcatgtggatggggattgttgccgactgcgtgaccagcgccattttcttgacggcgatggcaccaaacttgctgttaattggactgatgaaaagcgcatctcacgccacgctgagttggggcgactggttcctcgggatgttgccgctcagcattttactggttctgctggttccctggctggcttacgtgctgtacccgccggtactgaagtctggcgatcaggtgccgcgctgggcagagacggaactgcaggcaatgggcccgctctgtagccgtgaaaaacggatgctggggctgatggtaggcgcgctggtgctgtggattttcggcggtgattatatcgatgccgcgatggtcggttacagcgtggtggcactgatgctgcttctgcgcattatcagttgggacgacattgtcagtaataaagcggcgtggaacgttttcttctggctggccagccttatcaccctcgccaccggactcaacaacaccggttttattagctggtttggcaaactgttagcaggcagcttaagcggttatagcccaacgatggtgatggtggcgttgattgtggtgttttatctactgcgctactttttcgccagcgccacggcgtatacctccgctctcgcaccgatgatgattgctgctgcgctggcgatgccggaaatcccgctgccggtgttctgcctgatggttggtgcggcaattggtctggggagcattcttacaccatacgccaccggccccagtccgatttactacggcagtggttatctgccaacggcggattactggcgactgggggcgatttttgggctgatattcctcgtattgctggtgattaccggcttactgtggatgcccgtggtgttgctttaagtgaggacggtgccggaaattgctctccggcacccaatagttttacgcagccggtaactccgccagcggccagcgcggacgcacgctaacgccgagatccgccgtcgcgcctgctttaaaccgcaccattccggcataggcgatcatcgcgccgttatcagtacaaaattccggacgcgcgtagaacacttcgccgcggcgttttttcatcatttcagccagcttcgcccgtaacgtacggttagcactcacgccgcccgccatgaccagtcgcttaaagcccgtctgatccagcgcccgcttgcacttaatcatcagcgtatcgaccaccgcatcttcaaaggcgcgggcgatatcagcacgcgtctggtcgtcggtgccgttgtcacgaatggtatttgccgcgaaggttttcaggccggagaagctgaaatccagccccggacggtcggtcatcggacgcgggaagacaaagcgcccggcagtaccctgagccgccattttgctcagtaacggcccgccaggataatccagccccagcagcttcgcggttttatcaaacgcttccccggcggcatcatcgatagactcgccgagcagctcgtactgaccaatgccagtcacgctgattaactgcgtatgaccgccggaaacaagcagcgcaacaaacggaaattccggcgggttatcttccagcatcggcgctaacagatgcccttccatatggtgtacagggatcgccggaacgtcccaggcaaacgccagagaacgccccacggtcgcgccaaccagtagcgcgccgactaatccagggcctgcggtataggccacagcatcaatgtcttttgccgttaaaccagactcctttagcgccgcctggatcaacggtacggttttacgcacatgatcgcgggaggccagttcaggcacgacgccgccgtagtcagcgtgcaatttcacctgactatacaattggttggctaacaaacctttttcatcgtcgtaaatggcgatgccggtttcatcgcaggaagtttcaatacccagtacacgcatgacttgttttacctcgctttattaccgcgcagtgtaggaccaatgcgggttgatgtaaaactttgttcgcccctggagaaagcctcgtgtatactcctcacccttataaaagtccctttcaaaaaaggccgcggtgctttacaaagcagcagcaattgcagtaaaattccgcaccattttgaaataagctggcgttgatgccagcggcaaaccgaattaatcaaaggtgagaggcacatgccggtaattaaagtacgtgaaaacgagccgttcgacgtagctctgcgtcgcttcaagcgttcctgcgaaaaagcaggtgttctggcggaagttcgtcgtcgtgagttctatgaaaaaccgactaccgaacgtaagcgcgctaaagcttctgcagtgaaacgtcacgcgaagaaactggctcgcgaaaacgcacgccgcactcgtctgtactaattccccgagagcgttgctctccgatcagaccgagttgtagttgtaaggccgtgcttccgaaaggaatgcgcggcttattttcgtttatgaattgctaaaaatcggggcctatggctggacgaatcccacgcgtattcattaatgatctgctggcacgcactgacatcgtcgatctgatcgatgcccgtgtgaagctgaaaaagcagggcaagaatttccacgcgtgttgtccattccacaacgagaaaaccccgtccttcaccgttaacggtgagaaacagttttaccactgctttggatgtggcgcgcacggcaacgcgatcgacttcctgatgaactacgacaagctcgagttcgtcgaaacggtcgaagagctggcagcaatgcacaatcttgaagtgccatttgaagcaggcagcggccccagccagatcgagcgccatcagaggcaaacgctttatcagttgatggacggtctgaatacgttttaccaacaatctttacaacaacctgttgccacgtctgcgcgccagtatctggaaaaacgcggattaagccacgaggttatcgctcgctttgcgattggttttgcgccccccggctgggacaacgtcctgaagcggtttggcggcaatccagaaaatcgccagagtttgattgatgcggggatgttggtcactaacgatcagggacgcagttacgatcgtttccgcgagcgggtgatgttccccattcgcgataaacgcggtcgggtgattggttttggcgggcgcgtgctgggcaacgatacccccaaatacctgaacagcccggaaacagacattttccataaaggccgccagctttacggtctttatgaagcgcagcaggataacgctgaacccaatcgtctgcttgtggtcgaaggctatatggacgtggtggcgctggcgcaatacggcattaattacgccgttgcgagcttaggtacgagtaccaccgccgatcacatacaactgttgttccgcgcgaccaacaatgtcatttgctgttatgacggcgaccgtgcaggccgcgatgccgcctggcgagcgctggaaacggcgctgccttacatgacagacggccgtcagctacgctttatgtttttgcctgatggcgaagaccctgacacgctagtacgaaaagaaggtaaagaagcgtttgaagcgcggatggagcaggcgatgccactctccgcatttctgtttaacagtctgatgccgcaagttgatctgagtacccctgacgggcgcgcacgtttgagtacgctggcactaccattgataagccaagtgccgggcgaaacgctgcgaatatatcttcgtcaggaattaggcaacaaattaggcatacttgatgacagccagcttgaacgattaatgccaaaagcggcagagagcggcgtttctcgccctgttccgcagctaaaacgcacgaccatgcgtatacttatagggttgctggtgcaaaatccagaattagcgacgttggtcccgccgcttgagaatctggatgaaaataagctccctggacttggcttattcagagaactggtcaacacttgtctctcccagccaggtctgaccaccgggcaacttttagagcactatcgtggtacaaataatgctgccacccttgaaaaactgagcatgtgggacgatatagcagataagaatattgctgagcaaaccttcaccgacagtctcaaccatatgtttgatagcctgcttgaactgcgccaggaagagttaatcgctcgtgagcgcacgcatggtttaagcaacgaagaacgcctggagctctggacattaaaccaggagctggcgaaaaagtgatttaacggcttaagtgccgaagagcgatcgggaagcccccgacagccgcactgagaggcagcggcaaatatataagtacgccctcgtaattatcgttggcggtaaacaaccgttggatttcagcgttaacggctgaaggacatcgggtcaatcgcccaacaccaacctcatgaaataagtgtggataccgtcttatggagcaaaacccgcagagtcagctgaaacttcttgtcacccgtggtaaggagcaaggctatctgacctatgccgaggtcaatgaccatctgccggaagatatcgtcgatagtgatcagatcgaagacatcatccaaatgatcaacgacatgggcattcaggtgatggaagaagcaccggatgccgatgatctgatgctggctgaaaacaccgcggacgaagatgctgccgaagccgccgcgcaggtgctttccagcgtggaatctgaaatcgggcgcacgactgacccggtacgcatgtacatgcgtgaaatgggcaccgttgaactgttgacccgcgaaggcgaaattgacatcgctaagcgtattgaagacgggatcaaccaggttcaatgctccgttgctgaatatccggaagcgatcacctatctgctggaacagtacgatcgtgttgaagcagaagaagcgcgtctgtccgatctgatcaccggctttgttgacccgaacgcagaagaagatctggcacctaccgccactcacgtcggttctgagctttcccaggaagatctggacgatgacgaagatgaagacgaagaagatggcgatgacgacagcgccgatgatgacaacagcatcgacccggaactggctcgcgaaaaatttgcggaactacgcgctcagtacgttgtaacgcgtgacaccatcaaagcgaaaggtcgcagtcacgctaccgctcaggaagagatcctgaaactgtctgaagtattcaaacagttccgcctggtgccgaagcagtttgactacctggtcaacagcatgcgcgtcatgatggaccgcgttcgtacgcaagaacgtctgatcatgaagctctgcgttgagcagtgcaaaatgccgaagaaaaacttcattaccctgtttaccggcaacgaaaccagcgatacctggttcaacgcggcaattgcgatgaacaagccgtggagcgaaaaactgcacgatgtctctgaagaagtgcatcgcgccctgcaaaaactgcagcagattgaagaagaaaccggcctgaccatcgagcaggttaaagatatcaaccgtcgtatgtccatcggtgaagcgaaagcccgccgtgcgaagaaagagatggttgaagcgaacttacgtctggttatttctatcgctaagaaatacaccaaccgtggcttgcagttccttgacctgattcaggaaggcaacatcggtctgatgaaagcggttgataaattcgaataccgccgtggttacaagttctccacctacgcaacctggtggatccgtcaggcgatcacccgctctatcgcggatcaggcgcgcaccatccgtattccggtgcatatgattgagaccatcaacaagctcaaccgtatttctcgccagatgctgcaagagatgggccgtgaaccgacgccggaagaactggctgaacgtatgctgatgccggaagacaagatccgcaaagtgctgaagatcgccaaagagccaatctccatggaaacgccgatcggtgatgatgaagatagccatctgggggatttcatcgaggataccaccctcgagctgccgctggattctgcgaccaccgaaagcctgcgtgcggcaacgcacgacgtgctggctggcctgaccgcgcgtgaagcaaaagttctgcgtatgcgtttcggtatcgatatgaacaccgactacacgctggaagaagtgggtaaacagttcgacgttacccgcgaacgtatccgtcagatcgaagcgaaggcgctgcgcaaactgcgtcacccgagccgttctgaagtgctgcgtagcttcctggacgattaatcggtaggccggatcaggcgttacgccgcacccggcactaggccctctgcacaaacgccaccttttcggtggcgttttttatcgcccacgcactaccagcgcctggtccagctcgcgatacgcttcaaccagtttctccagactaacgcgacttaaaccgctgggatttggcagcacccaaatctgcgtgctaccaatggtgagcgtttgtttcccccactgtgcaccgcgctggctgaatccctgttcatatgcttgtttgcccagaatcgccaacgcctgcggctgataatcttcaattttttcaatcagcttacgcccgcctgcgtgtagctcctgcttactaacttcattggcttgcaccgttggacggtctaccagtttggtgacgccacaacgataatccagcagatgctgtgcctcctgcggcttcaactgacggtcggtaaacccggcctgatatatcaccttccagaagcgatttgccggatgagcaaagggaaaaccagtcccggcggaactaagcccagggttgataccgcaaaacacgacccgtaaccctggagccaaaatatcctcaaccatatttactcctttctaacatcaccaggaaaagtataacggattgaaaatacattgtttataaaaacagcaggcgcgcggtaatggctggattgcgacacggagttactttataatccgctaccatggccccttagctcagtggttagagcaggcgactcataatcgcttggtcgctggttcaagtccagcaggggccaccagatatagcaaaggctgacgagaaatcgtcagcctttttctttttatatatcagttactttgcgtgccagtaagccgctgcacgtacccgctgtgggtcatactgttccgcttcaaagcggcggcttaaattcttaacgactttaccttcgccggttatccagatgaagtaatcatcggcagggatttgcatctgcgccagacgcgcatctaccgcctgctcatcatgtgccagccattcgatattaaaaccatcaaggtgcgcgagataatcctgacaggcgttatcccgcacgctaaccagcgcactaacttgcggtttaacggcaagtttgctcaacgtttccaggcggcggcgcaatgcaggcattccggattcatcgcagacatacagctgatacgcgtaatcttccggcaccaccaggctaccgcgcggacctgccaccgtaagtttatcgcccggttgcgcctgcatcgcccagccgctggcgaccccaccgtcgtgaataaagaaatcaatcgccagttcatggcgtagttcgtcatacagcggcgtatagtcacggctcggtgggcgtggtccttccggccagacgatgccctcttccgttaccgttggcggcacaaagtgagcgtcaggttgaggaaagaagagtttgctgtgatcgtcaaagccacggcttgtaaaaccgtccagcgcctcgccgccgaggacaatgcgctgaaaaccggcgctgatgcgctcaacgcgtaacacagtcagttcacggaagcgcagatcattgcgaacgcgctgcgggtagcggggggtgttattcattgttatcgccttcgtgatggtaatcagatatatctaaataaaactcgcaaatgataatgattgttaatcatgataaatgcaagcgatttgtagaactgatatgtctatagtctgataagacgaaccgcctcttctcaggcatcattactcaacgccggatgcggcgtgaacgccttatccggcctacgtgtgagatgagtccacgtttaaaaatcatttttacacttgcaagaacgctcatatcagatataaattagatatatctaattaagcaaaaggaggctgatatgagccatcatcacgaagggtgttgtaaacatgaaggccagccacgccatgagggctgctgcaaaggtgagaagagtgaacacgagcactgcggacacggtcaccagcatgaacacggtcaatgctgcggtggtcgccacggtcgcggcggcggtcgtcggcaacgtttctttggtcacggtgaattacgtctggtgattctggatattctcagccgcgatgacagccacggttacgaattgattaaagcgattgagaatctaacccaggggaattacaccccaagcccgggcgtcatctacccaacgctggattttctgcaggagcagagcctgattaccatccgcgaagaggaaggaggtaagaagcagattgcgctgaccgaacaaggcgcgcagtggctggaagaaaaccgcgaacaggtggagatgattgaagaacgcatcaaagcgcgttgcgttggcgcggcgctgcgccagaacccgcaaatgaagcgggcgctggataattttaaagcggtgctggatttacgcgtcaaccagagcgatatcagtgatgcacaaataaaaaagatcattgcggtgatcgaccgcgccgcttttgatattacgcaactggattaatcgccgcatccgccagtggcgcggtgcaattgccggatgcgacgcttgacgcgccttatccggcctacacccgctacacaccccgcaggcctgataagatgcgccagcatcgcatcaggcattgtgctccaaccgccggatccggcataccgattaatgcagtaccgtcaccgcgtcttccagtcggctggcgcggtgtttcaccatcgcgctcacctgcgcactctcttccaccagctcggcatttttctgggtgatcaggttaagctcatccactgcacgggtcaggctggaaagcccatcggcctgttccagcgtactatggctaatctgggcgatcaactgggtgacgtttttcacctgtgccacaatatcttccatcgtccgtccggcggcgtgtacctgctggctaccggattgcaccttatcagcactggcatcaatcagcttgcgaatatcgttggcagcattagcgctgcggctggctaaatgacgcacttcccctgccaccactgcaaaacctttgccctgttcgccggcacgcgccgcttccaccgccgcattcagggccagaatattggtctgaaacgcaatatcgttaatcaggctagtaatggtgccaatgcgctgggtactgtcggcgatatcgtccattgtcttgatcaccgtggtcatcgcctccccaccctgcactgccgcattactggcagtgatactcagtttatcggcagcgctcgccgtggcagagttctgtttcacgctcgccgccatttggttcatggtcgccaccgtttgctgaacgttatcaactgtctgctgggtatgttcgttcagttcatcggtgcctttcgccagcgtctcactgccatttctgacactggacacctggctactgacatcgttaattagccaacggcacatcaggccaagttgccctaccgcacgtaatgtcagccccagctcatcgctgcgattcagatgctcaacactattacgttctccggtcgccaccttcagtgcctgatgggcaacattttctatcgggcgcacaatctgccattcaaaacaggcgcttgccaacaataccactaacgcacagaggatatacgtcaccaccggggcagcaacaaaccaaagcatggccgccagcaagataaacatcagggtcatcactccacgcgcccgccagcgaagcggtaaactaggcagtttacccagccagcctttacgcaccaccaggcctttatgaatacgcttactggtacgtccggcgttcaacgctttgtacagcggctccaccgccgcgatctcttcatccgtcgcccgggtacgaatgctcatatagccactgatttttccctcgcgcaccatcggtaccgcattggcccgcacccaataatggtcaccatttttgcggcgatttttcacgatgccgctccagggctccccttttttcagggtgaaccacatatccgcaaacgccgcttttggcatatccgggtgacgcaccatgttgtgcggctgcccttgtaactcttgcaaggtatagccgctcacctgcacaaaagtgtcattagcatgagtgatatagctttgcagatcggtagtggacatcagagtggtatcgtccgccagcggggtattttgctgggtgacatacggatgagaagacatgttcgcgtcctgtgcaggttatatggttgttaacttcttgtcagagtttatgtcggccccgctgcggttatctttaaccgattaatttgatttagatcgcaatttgcgatttaaacacaaatctaattccttgatttaaaatactttcactctgttactatacgaaaacgttaattatcttgcccaaaaatcaggcaattattgccctgaaaacgtgcatttgcgcagcaatcatcaaatccatacccgacaaaaaccgtgcaaaataacaacaaatgttaacagatagcattaaatattgcacaaatgataaccgaatttgtgtttatcccgattttcgcgatcgcagccggagtggcgcaatccctgcaatacttaaatcggtatcatgtgatacgcgagcctccggagcatattttgaacaggttacctagcagcgcaagcgctttagcgtgcagcgcccacgccctgaatctcattgagaagcgaacgctggatcatgaggagatgaaagcacttaaccgagaggtgattgaatacttcaaagagcatgtcaatccggggtttttagagtatcgcaaatctgttaccgccggcggggattacggagccgtagagtggcaagcgggaagtttaaatacgcttgtcgacacccagggccaggagtttatcgactgcctgggaggttttggaattttcaacgtggggcaccgtaatccagttgtggtttccgccgtacagaatcaacttgcgaaacaaccgctgcacagccaggagctgctcgatccgttacgggcgatgttggcgaaaacccttgctgcgctaacgcccggtaaactgaaatacagcttcttctgtaatagcggcaccgagtccgttgaagcagcgctgaagctggcgaaagcttaccagagtccgcgcggcaagtttacttttattgccaccagcggcgcgttccacggtaaaagtcttggcgcgctgagcgccacggcgaaaagcaccttccgcaaaccgtttatgccgttactgccgggcttccgtcatgtgccgtttggcaatatcgaagccatgcgcacggctcttaacgagtgcaaaaaaaccggtgatgatgtggctgcggtgatcctcgaaccgattcagggtgaaggtggcgtaattctgccgccgccgggctatctcaccgccgtacgtaagctatgcgatgagttcggcgcactgatgatcctcgatgaagtacaaacgggcatggggcgcacgggcaagatgttcgcctgcgagcatgagaacgtacagccggatatcctctgccttgccaaagcgctcggcggcggcgtgatgccgattggcgcgaccatcgccactgaagaggtgtttagtgttctgttcgacaacccattcctgcataccaccacctttggcggcaacccgctggcctgtgcggcggcgctggcgaccatcaatgtgttgctggagcagaacttaccggctcaggctgagcaaaaaggcgatatgttgctggacggtttccgtcaactggcgcgggaatatcccgatctggtacaggaagcgcgtggtaaagggatgttgatggcgattgagtttgttgataacgaaatcggctataactttgccagcgagatgttccgccagcgcgtactggtggccggaacgctcaataacgccaaaacgatccgcattgaaccgccactgacactgaccattgaacagtgtgaactggtgatcaaagcggcgcgtaaggcgctggcggccatgcgagtaagtgtcgaagaagcgtaatatcaaatcggatggcgatacgacgtcgccatccgatctttttatacgacgcgtacgcccgcaggcatcatccgctccggcgttaacagcacgctttcactgccgtcatcggtttccgcacacaacagcatgcattcgctcgtttcaccacgcattttcgctttttgcagattgcataagaccaccaccgttttccccatcagctcttcttcgctgtagtacggcaccaggctggtcacggtttgcagcgttttttgccccacatcaacctgtacgatgtacagcttgtcggcgttttcatggcgtttcacttccacaatctttccgacgcgcatttccagacgtgcaaaatcagcgtaagccacggtttccattgcttcctcccttagggtaaaattttactaaactatagcaaaagtttttctcaatcctgtaggctaaaaatggagaatgcaggcgtgatcacattcgtgagccgctgtgttaccgttacagcgtcaaagaaacgcgctttatttactgaaaacaggtgacccgataagcacttcctctacaatgggggcgcacatcagggaaagtaaaaaaggtaaacatggcaacactaaaagacatcgcaatcgaagctggcgtatccctggcgacagtatccagggtcttaaatgacgatccgacattgaatgtgaaagaagagacgaaacatcgcattctcgagatcgccgaaaagctggagtacaagaccagtagtgcccgtaaactccagacaggtgcagtcaaccaacaccatattctggctatctacagctaccagcaggagctggagatcaacgatccttactatctggcgatccgccacggcattgaaacccagtgcgaaaagctgggcatcgagctcaccaactgttatgaacacagcggcttaccagacattaaaaacgtcaccggtattttaattgtcggcaaacccacgcccgccctgcgcgccgctgccagcgcgttgaccgacaatatctgttttatcgactttcacgaacccggcagcggttacgatgcggtggatatcgatctggcacgcatcagtaaagaaatcatcgacttctatatcaaccagggcgttaatcgtattggttttattggcggtgaagatgagcctggcaaggcggatattcgtgaggtcgcctttgcggaatatggccgactgaaacaagtggtacgcgaagaggatatctggcgcggcggtttttccagtagcagcggttatgaactggcaaaacaaatgctggcgcgggaagactatccgaaggcactgtttgttgcttccgattccattgctatcggcgtactgcgggcaattcatgaacgaggcctgaacatcccacaggatattagccttatcagcgttaacgatatccccaccgcgcgatttacctttccgccgctctccaccgtgcgcatccattccgagatgatgggaagtcagggcgttaacctggtgtatgaaaaagcccgcgatggtcgcgcgctgccgctgttagtcttcgttcccagcaaattaaaactgcgcggcacgacccgttaaatccccttacacactgtccggcaatcgtttttgccggacagtgctgccgtttattttcgtgatccagttaaagtaaatgcatttacctgctactttttagtaaaaattttactaaactccccagcaattacacaaactaccatcaccatgaatggttccgatttctctctaccgggaggccctatgaatcgctgggaaaacattcagctcacccacgaaaaccgacttgcgccgcgtgcgtacttttttagttatgattctgttgcgcaagcgcgtacctttgcccgcgaaaccagcagcctgtttctgcccttaagcggtcagtggaatttccacttttttgaccatccgctgcaagtaccagaagccttcacctctgagttaatggctgactgggggcatattaccgtccccgccatgtggcaaatggaaggtcacggcaaactgcaatataccgacgaaggttttccgttccccatcgatgtgccgtttgtccccagcgataacccaaccggtgcctatcaacgtattttcaccctcagcgacggctggcagggtaaacagacgctgattaaatttgacggcgtcgaaacctattttgaagtctatgttaacggtcagtatgtgggtttcagcaagggcagtcgcctgaccgcagagtttgacatcagcgcgatggttaaaaccggcgacaacctgttgtgtgtgcgcgtgatgcagtgggcggactctacctacgtggaagaccaggatatgtggtggagtgcggggatcttccgcgatgtttatctggtcggaaaacacctaacgcatattaacgatttcactgtgcgtaccgactttgacgaagcctattgcgatgccacgctttcctgcgaagtggtgctggaaaatctcgccgcctcccctgtcgtcacgacgctggaatataccctgtttgatggcgaacgcgtggtgcacagcagcgccattgatcatttggcaattgaaaaactgaccagcgccagctttgcttttactgtcgaacagccgcagcaatggagtgcagaatccccttatctttaccatctggtcatgacgctgaaagacgccaacggcaacgttctggaagtggtgccacaacgcgttggcttccgtgatatcaaagtgcgcgacggtctgttctggatcaataaccgttatgtgatgctgcacggcgtcaaccgtcacgacaacgatcatcgcaaaggccgcgccgttggaatggatcgcgtcgagaaagatctccagttgatgaagcagcacaatatcaactccgtgcgtaccgctcactacccgaacgatccgcgtttttacgaactgtgtgatatctacggcctgtttgtgatggcggaaaccgacgtcgaaagccacggctttgctaatgtcggcgatattagccgtattaccgacgatccgcagtgggaaaaagtctacgtcgagcgcattgttcgccatatccacgcgcagaaaaaccatccgagcatcatcatctggagcctgggcaatgaatccggctatggctgtaacatccgcgcgatgtaccatgcggcgaaagcgctggatgacacgcgactggtgcattacgaagaagatcgcgatgctgaagtggtcgatattatttccaccatgtacacccgcgtgccgctgatgaatgagtttggtgaatacccgcatccgaagccgcgcatcatctgtgaatatgctcatgcgatggggaacggaccgggcgggctgacggagtaccagaacgtcttctataagcacgattgcattcagggtcattatgtctgggagtggtgcgaccacgggatccaggcacaggacgaccacggcaatgtctggtataaattcggcggcgactacggcgactatcccaacaactataacttctgtcttgatggtttgatctattccgatcagacgccgggaccgggcctgaaagagtacaaacaggttatcgcgccggtaaaaatccacgcgcgggatctgactcgcggcgagttgaaagtcgaaaataaactgtggtttaccacgcttgatgactacaccctgcacgcagaggtgcgcgccgaaggtgaaacgctcgcgacgcagcagattaaactgcgcgacgttgcgccgaacagcgaagcccccttgcagatcacgctgccgcagctggacgcccgcgaagcgttcctcaacattacggtgaccaaagattcccgcacccgctacagcgaagccggacaccctatcgccacttatcagttcccgctgaaggaaaacaccgcgcagccagtgcctttcgcaccaaataatgcgcgtccgctgacgctggaagacgatcgtttgagctgcaccgttcgcggctacaacttcgcgatcaccttcagtaaaatgagtggcaaaccgacatcctggcaggtgaatggcgaaagcctgctgactcgcgagccaaagatcaacttcttcaagccgatgatcgacaaccacaagcaggagtacgaagggctgtggcaaccgaatcatttgcagatcatgcaggaacatctgcgcgactttgccgtagaacagagcgatggtgaagtgctgatcatcagccgcacagttattgccccgccggtgtttgacttcgggatgcgctgcacctacatctggcgcatcgctgccgatggccaggttaacgtggcgctttccggcgagcgttacggcgactatccgcacatcattccgtgcatcggtttcaccatgggaattaacggcgaatacgatcaggtggcgtattacggtcgtggaccgggcgaaaactacgccgacagccagcaggctaacatcatcgatatctggcgcagcaccgtcgatgccatgttcgagaactatcccttcccgcagaacaacggtaaccgtcagcatgtccgctggacggcactgactaaccgccacggtaacggtctgctggtggttccgcagcgcccaattaacttcagcgcctggcactatacccaggaaaacatccacgctgcccagcactgtaacgagctgcagcgcagtgatgacatcaccctgaacctcgatcaccagctgcttggcctcggctccaactcctggggcagcgaggtgctggactcctggcgcgtctggttccgtgacttcagctacggctttacgttgctgccggtttctggcggagaagctaccgcgcaaagcctggcgagctatgagttcggcgcagggttcttttccacgaatttgcacagcgagaataagcaatgaggatcatcgataacttagaacagttccgccagatttacgcctctggcaagaagtggcaacgctgcgttgaagcgattgaaaatatcgacaacattcagcctggcgtcgcccactccatcggtgacagtttgacttaccgcgtggagacagactccgcgaccgatgcgctatttaccgggcatcgacgctattttgaagtgcattactacctgcaagggcagcaaaaaattgaatatgcgccgaaagagacattacaggtagtggaatattatcgtgatgaaactgaccgtgaatatttaaaaggctgcggagaaaccgttgaggtccacgaagggcaaatcgttatttgcgatatccatgaagcgtatcggtttatctgcaataacgcggtcaaaaaagtggttctcaaagtcaccatcgaagatggttatttccataacaaataacaactacggcggcaaaaggagtttgccgccaccgctaccctactcattttcggagatgtgttatgtctgataccaaacgtaatacaatcggcaaattcggcttgctcagcctgacttttgccgccgtttacagctttaacaacgttatcaataataatattgagcttggactggccagcgcaccgatgtttttcctcgcgacgattttttattttattcccttctgtctgatcatcgcagaatttgttagcttaaataaaaacagtgaagccggtgtctacgcgtgggtaaaaagtagcctgggcggacgttgggcatttattactgcctatacctactggttcgtaaacctgttctttttcaccagtctgttgccgcgcgttattgcttatgctagctatgccttcctcggatacgaatatattatgacgccggttgccaccaccattatcagtatggtgctgttcgccttctccacctgggtttccaccaacggggcgaaaatgttggggccaattacctccgtcactagtacgctgatgctgctgttaacgctctcctacattttactggcaggtacggcgctggttggcggcgtacagcctgctgacgccatcaccgttgacgcgatgatcccgaacttcaactgggcgttcctcggcgttaccacctggatctttatggccgcaggtggcgcggagtccgtcgctgtgtacgttaacgacgtcaaaggcggtagcaaaagcttcgttaaagtgatcatcctcgccgggatttttatcggcgtactgtattccgtctccagcgtgctgattaacgtcttcgtcagcagcaaagagttgaaatttaccggcggaagcgtgcaggtattccacggcatggcggcgtattttggtctaccggaagcgttgatgaatcgctttgtcggtctggtgtcctttaccgcgatgttcggttccctgctgatgtggaccgcaacgccggtgaaaattttcttctccgaaatcccggaaggcatctttggtaagaaaaccgtcgaactgaacgaaaacggcgttccggcgcgcgcagcgtggatccagttcctgatcgtcatcccgctgatgattatcccgatgctcggttccaataccgtgcaggatctgatgaatactattattaatatgaccgccgcagcgtccatgcttccgccgttattcatcatgctggcttacctgaatttacgcgccaaattagatcacctgccacgcgatttccgtatgggctcccgccgcaccggtattatcgttgttagtatgctgattgcgatatttgccgtagggtttgtcgctagcacattcccgactggcgcgaatattctgaccatcattttttataacgtcggcggtattgttatcttccttggctttgcgtggtggaaatacagtaaatatataaagggattaacggctgaagagcgccatattgaagcgacgccagccagcaatgttgattaagcagaataataaaaaatgagcaggcattttccctcttcctggatgaggagagggaaaatagtttctgcctttatatttttataattacaacgataaaaggctgtactttttctttagctcatggattaacacaatgaaattaatcactgcaccatgcagagcattacttgctctgccgttttgctacgccttttctgcggcaggagaagaagcacgtccggcagaacatgacgacacaaaaacacccgcaattaccagcacatcttctcctagttttcgtttttacggcgaattaggggttggtggatatatggatttagagggtgagaataaacataaatacagcgacggtacctatattgaaggtggcctggagatgaagtacggctcctggttcggcctgatttacggcgaaggctggaccgtgcaggccgaccacgacggcaatgcctgggtgccagaccatagctggggtggtttcgagggcggaattaaccgtttctatggcggttatcgtaccaatgatggcaccgaaatcatgctcagtctgcgtcaggattccagcctggatgacctgcaatggtggggcgatttcacccccgatctgggctacgtcattcccaatacccgcgacattatgactgcgctgaaggtacagaacttaagcggcaactttcgttatagcgtcaccgcgactcctgccggacatcatgatgaaagcaaagcctggctacattttggcaaatacgatcgctatgacgacaaatacacctatccggcaatgatgaacggttacatccagtatgaccttgccgaaggcatcacctggatgaacggtctggaaatcaccgacggcacaggacagctctatctcacgggcctgctaactcctaactttgccgctcgcgcctggcaccataccggacgcgccgacgggctggacgtaccgggaagtgaaagtgggatgatggtgagcgccatgtatgaagcgttaaagggcgtttatctctccaccgcttacacctacgccaaacatcgccctgaccacgctgacgatgaaaccacctctttcatgcagtttggtatctggtacgaatacggcggcggacgtttcgccacggcttttgatagccgcttctacatgaaaaatgcctctcacgatcccagcgaccaaatcttcctgatgcaatatttctactggtaataaggactgtaatttcatgaaaataaaaactattttaacgccagtaacctgcgctctgctgataagtttttccgcccatgccgctaacgccgacaattataaaaacgtgattaaccgtactggcgcgccgcagtacatgaaggattacgattacgacgatcaccagcgttttaatccgtttttcgatctcggagcctggcatggtcatctgttgccagacggccctaacaccatgggcggctttccgggcgttgcgctgctgacggaagagtacatcaactttatggccagcaatttcgaccgcctgaccgtctggcaggacggcaagaaagtcgactttacgctggaggcatacagtattcccggtgcgctggtgcaaaaactgacagcaaaagatgtgcaagtcgaaatgactctgcgcttcgccacgccgcgcacgagtctactggaaaccaaaatcaccagcaataaaccgctggatctggtgtgggacggcgaactgctggaaaaactggaagcgaaagaagggaaaccgctttccgataaaaccattgctggcgaataccctgactatcagcgcaaaatcagcgccacccgtgatggcctgaaagtcacctttggcaaagtgcgcgccacctgggatctgctgacctccggcgaaagcgaatatcaggtgcataaatccctgccggtgcagactgaaatcaacggtaatcgctttaccagtaaggcgcatatcaacggtagcaccacgctctacaccacctattcccatctgctgaccgctcaggaagttagcaaagagcaaatgcagatccgcgatattctggcgcgtccggcgttttatctcaccgccagccagcaacgctgggaagaatacctgaagaaagggttaaccaatccggatgcgacgccggaacagacgcgcgtcgcggtgaaagcgatcgaaacgctcaacggtaactggcgcagtccgggcggtgcggtgaaatttaacaccgttacaccgagcgtgaccgggcgctggttctccggcaatcagacctggccgtgggatacctggaagcaggcgtttgcgatggcgcatttcaatccggacatcgccaaagagaatatccgcgcggtcttctcctggcagatccagcctggcgatagcgtgcgtccgcaggatgtgggctttgtccccgacctgatagcgtggaaccttagccccgagcgtggtggcgatggcggcaactggaacgaacgtaataccaaacccagccttgccgcctggagcgtgatggaagtgtataacgtcacccaagataaaacctgggtggcagagatgtacccgaaactggtggcctatcacgactggtggttacgtaaccgcgatcacaacggcaacggcgtgccggaatatggcgcgacccgcgacaaagcccacaacactgagagcggcgagatgctgtttacggtgaaaaaaggcgataaagaagagacgcagtctgggctgaacaactacgcccgcgtggtggagaaaggccagtacgacagtctggaaattccggcacaggttgctgcaagctgggaaagcgggcgtgatgatgccgccgtctttgggtttatcgacaaagaacagttggataaatatgtcgctaatggcggcaaacgtagcgactggacggtgaaattcgccgaaaaccgcagtcaggacggaacgttgctgggctacagcctattgcaggagagcgtggatcaggccagctatatgtacagcgataaccattatctggcggagatggcaaccatcctcggtaagccagaagaggccaaacgctatcgccagttggcacagcagctcgcggactacatcaacacctgtatgttcgacccgactacccagttctactatgacgtacgtattgaagataaaccactggcgaacggctgcgcgggcaaaccgattgttgagcgcggtaaagggccggaaggctggagcccgctgtttaacggtgcggcaacgcaggccaatgccgacgcggtggtgaaggtgatgctcgatcctaaagagttcaacacctttgtcccgctgggaacggcggcgttaaccaatccggcttttggcgctgatatctactggcgtgggcgcgtatgggtggatcagttctggtttggtctgaaagggatggagcgttacggttatcgtgatgatgccctgaagctggcggatacgttcttccggcacgccaaagggttaaccgccgatggaccaattcaggaaaattacaacccgctgacaggcgcacagcaaggcgcaccaaatttctcctggagtgccgcgcatttgtatatgttgtataacgattttttccgtaagcaataatttgcaactgctggcggatgcggcgtaaacgccttatccgccctacatgtgcaatcctcctggccggataaaacgcggcaagcgttgcatccggcaactgcaccgcgccactggcggatgcggcgtgaacgccttatccgccctacatgtgtgttcccgtaggtcggataagacgcgacaagcgtcgcatccggcatctgcaccgcgccactggcggatgcggcgtggacgccttatccgccctacatgtgcaattccgtaacctggataaaacgcgacaagcgtcgcatccggcgttatcaccgggcgtattctttttgaatcccatcacaaaccccgcactccccttttcccttttctccggcgacggctaaattagaactcatccgaccacataacaattattttacatactggacaattttatgagctacccgagcctgttcgccccgctggatttaggttttaccacgttaaaaaaccgcgtgttgatgggcagtatgcacaccgggctggaggaatacccggacggtgccgagcggctggcagcgttttatgccgaacgcgcccgtcacggcgtggcgctgattgtcagcggcggcattgcaccagatttaacaggcgttggcatggaaggtggcgcaatgctcaacgacgccagccagatcccacaccatcgcaccattaccgaagcggtacatcaggaaggcggcaaaatagccctgcaaattttgcataccgggcgctacagctaccaaccgcatctggtcgccccgtccgcattgcaggcccccatcaaccgtttcgtgccccatgagttaagccatgaagagatcctgcaactgatcgacaatttcgcccgctgcgcgcaactggcgcgggaggcaggatacgacggtgtagaggtgatgggttccgaagggtatttgatcaacgaatttctgacgctgcgcaccaatcagcgtagtgaccagtggggcggcgattaccgcaaccggatgcgatttgccgtagaagtagtgcgtgcggtgcgcgaacgcgtcggcaacgacttcattattatctaccgactgagcatgctcgacctggtcgaagacggcgggacttttgccgaaacggtagagctggcgcaggccattgaagcggcgggcgcgaccattatcaacaccggcattggctggcatgaagcacgtattccgaccattgccacgcccgtgccgcgcggcgcatttagctgggtcacgcgcaaactgaaaggccacgtcagcctgccgctggtaaccaccaaccggattaacgatccgcaggttgccgacgatattctcagccgcggcgatgccgatatggtaagcatggcgcgaccgtttcttgctgatgcggagctgctgagtaaagcgcaaagcggacgagccgatgagatcaacacttgtattggctgcaatcaggcctgtctcgatcaaatcttcgttggcaaagtcaccagctgcctggtgaatcctcgcgcctgccacgaaaccaaaatgccaatccttcccgccgtgcagaaaaaaaatctggcggtggtcggtgcgggacctgctgggctggcgtttgccattaacgcggcggcgcgtgggcatcaggtaacattgtttgacgctcatagcgagattggcgggcagtttaatatcgccaaacagatccccggcaaagaggagttttacgaaacgctgcgctattaccgccggatgatcgaagtgacgggcgtgacgctaaaactcaatcacaccgtgacggcggatcagttacaggctttcgatgaaacgatcctcgccagtgggatcgtgccgcgcactccgcccatcgacgggatcgatcatccgaaggtattgagttatctcgatgtactgcgcgacaaagcgccggttggcaacaaagttgccatcatcggttgtggcgggattggttttgatacggcgatgtatttaagtcagccgggcgaatccaccagccagaatatcgccgggttctgtaatgaatgggggatcgacagtagcctacaacaggctggtggcttaagcccgcagggaatgcagatcccccgtagcccacggcagattgtgatgctccagcgcaaagccagcaaaccaggacaggggttaggcaaaaccaccggctggatccatcgcaccaccctgctcagccggggtgtgaaaatgatcccaggcgtaagttatcagaagattgacgatgacgggctgcatgtggtgatcaacggcgaaacgcaggtattagcagtggacaatgtggtgatctgcgcagggcaagagccaaaccgcgcgctggcgcaaccgctgattgatagcgggaaaacggtgcatttaattggcggctgcgatgtggctatggagctggacgcacgacgggcaattgcccagggaacacggctggcgctggagatttaaatcgttatttgaagcgccggatgcaacgcatccggcacgtcgcgttaatcaataaacaaggcgggagaaatgccgaatcgcgttgccaattttttagcgtgttccagcgttaatttcctcttcccgctcaaaacgcgactcaccatagatttactgccaatttccggcagatcggaaagggttaaaccatattgatccataagggtacgaatcacggctataccgccaggcatggcttgagccatggcattaaattccgcaaattcgggcgcactttcttcccacgcggttattttggcacacaccagatccagcaaggggttttcaggatcgttgagcagcagatgatctaccagttccagcgcctgggtgtattgttcctcgttctgaatacccgccagaaaaggtgccacagcagttagcttttctcctgcttgcaagatgtcggcaatcgcaatcattttttccccttagtacgatgaacagcggtaaagaaatcgtattctttatgcgtcataacttcacgtatgtagcacttttggctttcaaaaaagaccattgctacaacacgtaattcattgcccccaacattgaaaacataatgcttatccagatatttgaagttatccagagatgggaatactgcttttaaactctcaggttttttgaaatatcccttagcaatcgtgttccccagagccaccaactccgttttatgttgcgggtatttttccgcagcatctttcaatgctttttgagttatcaggtgcattcttcatcacgtccgttgacaaattggcaatatgataacatccgttgccagattggcaacggatgaatttatctgtgtgacggaagaataaacgtagaaaaacgctaaacaagagaatgtagacgatggtgacagggattttttgttttatggaagcgcgattccagaactgggcagacattgccggatgcgacgcttgccgcgtcttatccggcctggagtaacgtgctgaacgtaggccggataaggcgtttacgccgcatccggcaggtaactcccaatcttaccgacgacgtcccagcttcaccgctttcagtaccacaaatttattattcgtcgcaatagtggtgcagttgccgaaaatcttcttcagtttatggaagtaatccaggtgacggttggcaacgatatacagctcgccgttgattttcaggcagcggcgggcgtggtggaacatctcccaggcgacgttatcggtcagcgcatgttgttggtgaaacggcgggttgcagagcacagcattaaagcggaaaggctccacgccggagagcgcgttgttgatcataaactcgcagcgatccaacgcctctggcatgttggtttcaacgttcaaacggctggaagcaaccgccatcgggctttcatcgacaaacaccactttcgcctgcgggtttttatcaagcagcgtcagaccaataacgccattaccgcaaccgagatcgacaatctccccttcgagattctctggcagatgttgcataaagaagcgcgcgccgatatcaagcccggtgcgggagaagacattcgcatggttgtggatagtccagtcagtaccttccagcttccagctaacggtctgcggcgcatcggccagctgcggttcattgaaagtgcaattaatcaggcgcgcttttttccatgccagcgtggtggtggttgggccgagcactttttcgaacagttccagcgtggaagtgtgaatgtcacgggccttggcaccggcaataatacgtgtatcgctcgtgaccactttgcgcagcgcacgcagttgctgttccagcaatgccagtgttttcggcactttgatcagcaccacacccggctgttgcgggtagtcggcggtgctgtcgagaaacttcacgctgctctcatcaatcccgttgaggcgtaaattctcgcgcgtcgccagttcactgatgtaactgtcgccaatgctgtacggcttatgttccgccagtgcgcagcttaacgcaccaaaggcatcattcaggatcaacaccgggccgcggatttctgtgtcgtccaactgttgcagcaaatattcatccgccgcttcccacgcctgtagcgggttaacgtcatccgtcgccggaaaacgttgtagtgtcagactacggaaaccgttgtctaagtggctcatcggccctcctgaatgataaaatttcgacattgcccctgaaaagggtgcgtgagtataccctttttctctttttcgtgggcggttatgagcaatcttacttatcttcagggttatcccgagcagctactttcccaggtgcgaacactgattaacgaacagcgtctgggcgatgtgctggcaaaacgctatccgggaacacacgactacgccaccgataaagccctctggcaatatactcaggatctgaaaaatcagtttctgcgtaatgccccgccgatcaataaagtgatgtatgacaataagatccatgtgctaaaaaacgcgctcgggttacataccgctgtttctcgtgtgcagggcggcaagctgaaagcaaaggtggagatccgcgtcgctaccgtgtttcgcaacgcgccggaaccgtttttgcgcatgatcgtggtgcacgagctggcgcacctgaaggagaaagagcataacaaagcgttttaccagttgtgttgtcatatggaaccccagtaccaccagcttgagttcgacacccgactgtggctaacgcagttgagccttgggcagaacaaaatctgaaaatgatgtcaggcgttatcttttctttctttagcgcctaaaatcgacctcccccctttcgttaaggataacgaccatgctgcgcgcatttgcccgccttcttctccgtatttgtttttctcgccggactctaaagattgcctgcttactgttacttgtggcaggagcgaccatccttatcgccgatcgcgtaatggtcaacgccagcaaacagctgacctggagcgatgtcaacgccgttccggcgcgtaacgtgggtttattgctgggggcgaggccgggtaatcgctactttacccgacgtattgataccgcagcagcgttgtaccacgccggaaaagtgaaatggctgctggtaagtggcgataacggacgtaaaaattacgatgaagcaagtggtatgcagcaggctttgatcgctaaaggcgtaccagcaaaagtgatcttctgcgactatgccggattcagtacgctggatagcgtagtgcgtgccaaaaaggtttttggtgaaaaccatatcaccattatcagccaagaatttcataatcaacgcgccatctggctggcaaaacagtacggcatcgacgctatcggttttaacgcgccagacctcaatatgaagcacggtttttatactcaactgcgggagaaactcgctcgtgtcagcgccgtgattgacgccaaaatcctccatcgccagccgaaatatctcgggcctagcgtcatgattgggccgtttagtgagcatggctgtccggcgcagaaataatgcgtatctgcgcacgtcgaagatgaaaaaggcgtgctacattgacgacagaatccctttatggagtatccacgcgttatgatacgtttcgctgtgattggtacgaactggatcactcgccagttcgtcgaggccgcccatgagagcggtaaatacaagttaaccgccgtatattcccgcagccttgaacaggcccagcacttcgccaatgatttttctgtcgagcatctgtttaccagcctggaagcgatggcggaaagcgatgccattgacgcggtgtatattgccagcccgaattccctgcatttttcccagacacaacttttccttagccataaaattaatgtgatttgcgagaaaccgctggcgagcaatctggcggaagtggatgccgccattgcctgtgcgcgggaaaatcaggtggtgctgtttgaggcatttaaaaccgcctgcctgccgaactttcatttgttgcgccaggcgctgccgaaagtcggcaaactgcggaaagtctttttcaactattgccagtattccagccggtatcaacgttacctggatggtgagaatcccaacacctttaatccggcattctctaacggtagtattatggatatcggtttttactgtctggcgagcgcggtggcgttatttggtgagccgaaaagcgtgcaggcaaccgccagtttgctggcaagcggcgttgacgcccagggcgtggtggtgatggattacggtgatttcagcgtcaccttgcagcacagtaaagtcagtgattctgtcctggcgagcgagattcagggcgaagcaggaagcctggtgattgaaaaactgtctgaatgccagaaagtgtgcttcgtgccgcgtggcagccaaatgcaggatctcacccagccgcagcatattaataccatgctctacgaagcagagctgttcgctaccctggtggatgagcatctggtggatcatccagggctggcggtcagtcgcatcaccgccaaactgctgaccgagatccgccgccagactggggtgatttttccggcagatagcgtaaaactataattgccaaagtaaaacagtgtaaaaggtatgtaacagaccattgactggctgaatggtctgtcatactttgttacctgcaaaggggagtaacttcattgccggtcgatcgtcattacgatgtgtgaaaaaacacatccggtcaccgggcaacccgaaaggaatacgcagacgtattccttttttgttgtaagtgagaccttgccggaaggcgaggtctatgcataaaaagcagcggctgacgtcttccgacgttggccgtttttttatgtgtaaggaacttctatgaatactgtcggcacgccgttgctatggggcggattcgctgttgttgtcgccattatgctggctatcgacctgttgttgcaggggcgtcgtggggcacatgccatgaccatgaaacaggctgcggcctggagcctggtctgggtgacgctgagcttactgtttaacgccgctttctggtggtatctggtgcaaaccgaaggtcgcgccgttgccgatccacaggcactggcctttctcacaggttatctgattgagaaaagcctggcggtcgataacgtctttgtctggctgatgttgttcagctatttctctgttccggcggcattacaacgccgcgtgctggtgtatggcgtgctcggggcgattgttctgcgtaccatcatgatcttcactggcagctggctaattagccagttcgactggatcctgtatatcttcggtgccttcctgctgtttaccggcgtgaagatggcgctcgcccatgaagatgaaagtggcattggcgacaagccgctggtgcgctggctacgcggtcatttgcgcatgaccgacaccatcgacaacgagcatttctttgtgcgtaagaatggattgctgtacgccacaccgctgatgctggtactgattctggtggaattgagcgacgtgattttcgccgtggatagcattccggctatcttcgccgtgaccactgacccgttcattgtgctgaccagtaacctgtttgcgatcctcggcctgcgtgcgatgtatttcctgctggcgggcgtagcagagcgtttcagcatgctcaaatatggcctggcggtgattctggtgtttatcggtatcaagatgctgattgtcgacttctaccatattccaatcgccgtcagcctgggcgtggtgtttggcattctggtgatgacgtttattatcaacgcctgggtgaattatcggcatgataagcagcggggtggataatttttaatctgcctaagccgtgtaccctgtcattaacatgagcaccgttttctccctctcccttccagggagagggtcggggtgagggtaatttttcgcaccgatgctggcctgttcccctcaccctaaccctctccccaaacggggcgaggggactgaccgagtccttttttgatgttgtcatcagtctggaagccgcacgttggctttatttttatgtcaaagaaatgtaaccattaagtttcaaaatatgacctctctttaaaatccagcatttttcgcttcccgaagctgtaactttccttatactcgaccttgcaaacactttgttacatcctgaaagatgcgtcgacagaacgcaccagggatgtgcgacaacacaatgaaaggatcgaaaaatgactacgcaacgtagtccggggctattccggcgtctggctcatggcagcctggtaaaacaaatcctggtcggccttgttctggggattcttctggcatggatcagtaaacccgcggcggaagctgttggtctgttaggtactttgttcgtcggcgcactgaaagccgttgcccccatcctggtgttgatgctggtgatggcatctattgctaaccaccagcacgggcagaaaaccaatatccgccctattttgttcctctatctactgggcaccttctctgctgctctggccgcagtagtcttcagctttgccttcccttctaccctgcatttatccagtagcgcgggtgatattagcccgccgagtggcattgtcgaagtgatgcgcgggctggtaatgagcatggtttccaaccccatcgacgcgctgctgaaaggtaactacatcgggattctggtgtgggcgatcggcctcggcttcgcactgcgtcacggtaacgagaccaccaaaaacctggttaacgatatgagcaatgccgttacctttatggtgaaactggtcattcgcttcgcaccgattggtatttttgggctggtttcttctaccctggcaaccaccggtttctccacactgtggggctacgcgcaactgctggtcgtgctggttggctgtatgttactggtggcgctggtggttaacccattgctggtgtggtggaaaattcgtcgtaacccgttcccgctggtgctgctgtgcctgcgcgaaagcggtgtgtatgccttcttcacccgcagctctgcagcgaacattccggtgaatatggcgctgtgtgaaaagctgaatctggatcgcgatacctattccgtttctattccgctgggagccaccatcaatatggcgggcgcagcaatcactattaccgtgttgacgctggctgcggttaatacgctgggtattccggtcgatctgcccacggcgctgctgttgagcgtggtggcttctctgtgtgcctgtggcgcatccggcgtggcgggggggtctctgctgctgatcccactggcctgtaatatgttcggtattagcaacgatatcgccatgcaggtggttgccgtcggctttatcatcggcgtattgcaggactcttgcgaaaccgcgctgaactctagtactgacgtgctgttcactgcggcagcttgccaggcagaagacgatcgtctggcaaatagcgccctgcgtaattaattgtttaacccctttcgtctacggcggaaggggttttctcaactttaaacggatcaattccccttttctgcatccgccagaaacgaatgatattcaggccattcataagcagaaaactaccctcaatcatcgtgccgcctatgctccccgcccagaagttgtgaatcacccagcaacacgtactaaaccacattacgcagcgcatggtcagccctttacagcagaatagcgcccaggtactgacaatcgtgccgataaccggcaatagttcgacaggatgatggaacttcgcgaggccaattccgccagtcagcacaataaaaatcgccattacccataagctgcgcgtgcgtaaggtaatcaatgtacgaatggcattaaggatggcactggcaccagcgggataggtgcccagaagaaaaaaatgtacgccaataacggcgctatagacgctaagctgctttttgaagcgacgttcgtcacgattgaaaaatgttgtgataccaatcagaaaggcgatgacacccacgccctgggccagccaatacgcggtcatgataaatccttagcaggtatggaaaagcaaacggcgcttcacattatgaaacgccgttttttattaacaactcatttcgactttatagcgttacgccgcttttgaagatcgccagttcgcggaagtcgttacgctcgttacaggtttgcttaccgttggcaaactcaacgatggtgtcgataaattcttccagcaactgcggcatcgctttaccgtggatcaactgacccgcgtcaaagtcgatccagtgttttttcttcgccgccagttcactgttggtggcgattttcaccgtcggcacaaatccaccatacggcgtgccacgaccagtactgaacagcaccatatggcagcccgcacccgccagggcgctggtcgctacggcatcgttacccggcgcacttaacaagttcagccctggcgttttcagacgctcgccgtaacgcagcacgtcaaccacgacgctggaacccgctttctgggtacagccaagacttttgtcttccagcgtggtgataccgcccgctttgttccccgggcttgggttttcatagatcggctgatcatgggcaataaagtactgtttgaagtcgttgaccatggtgaccagtttttcaaacgttgcttcgtcgcggcaatggtccatcagcaactgctctgcgccaaacatctccggcacttcggtcagtacggtagtaccgccgttagcaatcacgtagtcagagaaacgccccagcatcgggttagcagtaataccagaaagaccgtcagaaccaccgcactccagaccaaacttcagttcgctgagtttgcctggctcgcgtttatcgttgcgcatcacgttatacagctgatgcaaatgctcgattccggcttcgatctcatcatcctgctgttggcagatcatgaaatgaacgcgttcaggatcgatatcgcccagcgtttcacggaatgcggcaacctggttgttttcacagcccagaccaatcaccagcactgcgcctgcgttcgggtggcgcaccatgttttgcagcatggtgcgggtattaatgtgatcgtcgcccagctgactgcagccgtaggtgtggctgaagaggaacacgccgtcagtaccttcggcgttgttggtctctttcagaaaacggttctggatctgccgcgcgatgccgttgacacagcccacggttggcaggatccacagctcattacgcaccccgacatcgccgttagcgcgacgatagatctgcacttcacgatctgccgcttgcgcaggcagatcctgaaaatcaggttgatagcgatactgatccagatcgctcagattcgtgcgcgtattgtgggcgtgaacgtgaacacctgccgcaatatccgccaatgcataaccaatcggcaggccatatttgatgacattggccccttttgcgatatccgttaacgcaaatttatgtccacgagcaacatcctggcgcagcgtaacagtctggttatcgacactgacttctgtgccttcagccaaatctgctaaagcgaccgcgacgttatccagcgcatggatcttgatgtattgcatatcaaccccagaccttagttcagttcaatggcgaagtagtcacgcgcattgttaaagcaaatatttttcaccatctcgcccagcaggttgatgtccgccggtgcttcgcccgcttccacccagcgaccgatcatctggcacagaatgcggcggaagtattcgtgacgggtgtaactcaggaagctacggctgtcagtcagcataccgacaaagcggctcagcagaccgagctgcgccagttgggtcatctgacgttccataccgtctttctgatcgttaaaccaccagccggaaccgaactgcattttgcccggcataccttcgccctggaagttaccgatcatggtgcccagcacttcgttatcgcgcgggttcaggcagtacagaatggttttcggcagcaggttttcttcattctgcttgctcagcaacttagacagctcttccgccatcggacggtcgttgatggagtcaaagcctacatccggccccagcagtttgaactgacgcaggttgttattacgcagcgcgccaatgtggtactgctgtacccagccgcgacgtgcatattcggcaccaaggaacaccagtaccgcagttttgaactgcgccacttcgtgctcgctcagggtttcgccagccagacggcgcgccagaatgctgtccagttccgcttcgttcgcttcagcaaacatcaccacatccagcgcgtggtcagacactttacagccgtgagcggcgaagtgatccagacgtttggtcagggcagtttgcaggtcagcaaagcggcgaatgtcggtatcggaaacttcgcccagcttcgccatgtagtcgttaaaggtcgcctgttcgatgttgaaggctttgtccggacgccagctcggcagcactttgatggtgaaagagccgtctttggcgatctctgcgtgatgctccagagaatcgatcgggtcatcggtggtgccgaccattttcacgttcatctgctgcatgatgccgcgcgcggagaagttatcctgcgccagcagttcgttacattcgttccagatttcatcggcagtactcggagaaagcaatttgccagtgataccaaacggacggcgcagttcgaggtgcgtccagtggtataacgggttgccgatagtgtgcggaacagtcgccgcccaggcgtcaaatttttcacggtcagacgcatcaccggtacacagacgctcggccacaccgttggtacgcatagcgcgccatttgtagtgatcgcctttcagccagatgtcatacaggtttttaaaacgatagtcttccgcaatctgctgcggcggcaaatggcaatggtaatcgaaaatcggctggtcttttgcgtagtcgtgatacagacggcgggcaaattcggtatctaacaggaaatcttcagtcataaacggagtcattttcgtcttcctctcaacgagtgagctagcttgcttatggtgcgatgctgacaaagttatcacaccaatttccagagtccgaagatattttcgtgagttagatcaataaacgtagttaaaaaaattactctcaaagtggtaaatctcgctgcaggccgcgccagtactggccttgctgtcgtcaggtaatgtccctacaaatattcccacatttgtgatggctctcaccttttaaagttgtatgacaagttatctttctgccgtcgcaaatcataagtcgacggaatgcaaattgccgattcattcatttgttagatgaatcgggttaaccggtacggaagccgaattagcacgaaactttcatggcaacgttcggggcgtgccggttttttttcggttacccggtcgtaactaacatcttcagcctctggcgggatgatggccgcgcttcctgcggatataacaaaacgatgaggttttacatgcgtaaaattaaagggttacgttggtatatgatcgcactggtgacgctcggcaccgtgcttggttacctgacgcgtaacactgtggcggcagctgcgccaactctgatggaagagttaaacatctccacccaacagtattcctatatcatcgcagcctattctgctgcttatacggtcatgcaaccggtagcaggttatgtactggatgtgctgggtacgaaaatcggttatgcaatgtttgctgtgctgtgggccgtgttctgtggtgcaaccgcgctggcaggtagctggggtggcctggctgttgctcgtggtgcggtcggtgccgcggaagcagcgatgatcccggcgggtctgaaagccagctccgaatggttcccggcgaaagagcgttccatcgcagtaggctactttaacgtaggttctagcattggtgcgatgattgcgccgccgctggtggtatgggcaatcgtaatgcacagctggcagatggcatttatcatctccggtgcattgagctttatctgggcgatggcatggctgattttctataaacatccgcgcgaccagaagcatctgaccgatgaagaacgcgactatattattaatggtcaggaagcccagcaccaggtgagcacggcgaagaaaatgtccgttggtcagatcctgcgtaaccgtcagttctggggtatcgcgctgccgcgtttcctggcagaaccggcctggggtacttttaacgcgtggatcccgctgttcatgtttaaagtttacggctttaacctgaaagagatcgcgatgttcgcctggatgccgatgctgtttgctgacctcggttgtatcctcggtggttacctgccgccgctgttccagcgttggtttggtgtgaacctgatcgtttcccgtaagatggtcgtaacgctgggtgcagtgctgatgattggcccgggtatgatcggcctgttcaccaacccgtatgtcgcaattatgctgctgtgtatcggtggttttgcccaccaggcactgtctggcgcgctgattacgctctcttccgatgtgtttggtcgtaacgaagtggcaacggcaaacggtttaaccgggatgtccgcatggctggcaagtacgctgtttgcgctggttgtcggtgcactggctgacaccatcggcttcagcccgctgttcgcagttctggcagtgttcgacctgttaggtgcgctggttatctggaccgtgttgcagaacaaaccggcgattgaggtggcgcaggaaacacataacgatcccgcaccgcaacattaacgtttcgtgtaagttttagtttcccttcaaagccgccttctcaggcggctttttcatcactgcgagtagagctaaactcgcaaaagtggtataacaaatatagtctgccgtatcatgcctggagcgcatatggaaatcactgaaccacgccgtttgtatcaacaacttgccgctgacctgaaagagcgcatcgaacagggcgtctatctggtgggtgataaactgcctgcagaacgctttattgccgatgaaaagaacgtcagccgtacggtagttcgtgaagccatcatcatgctggaagttgaaggctatgtcgaagtgcgtaaaggtagtggtattcatgtggtttccaaccagccgcgccatcagcaggcggctgacaataatatggaattcgccaattacggtccgtttgagttgcttcaggctcgccagctcatcgaaagtaatattgccgaattcgcggcaactcaggtaacgaaacaggacatcatgaaactgatggccattcaggaacaggcgcgcggcgaacaatgcttccgtgattccgagtgggatttgcagttccacattcaggtcgctctggcgacgcagaactccgccctggcggctatcgtggaaaaaatgtggacccagcgtagtcataacccgtactggaaaaaactgcacgaacacattgattcccgtaccgtcgataactggtgtgatgaccacgatcaaatcctcaaggcgctgattcgcaaagatcctcatgctgctaagctggcaatgtggcagcatctggaaaacaccaagatcatgttatttaacgaaaccagcgacgacttcgagttcaatgccgaccgctatctattcgccgaaaacccggtggtgcatctcgatacagccaccagcggcagtaaatgaaattcctgtccgacaggcgctgcaatgcgcctgtttgtctcgtcggtaagcgaaaagtataaagtgtcagcctgtgtaaatcctctcgccaccctcccctgcattcagcaaaatcagactccacggacatgtaattttgataacgaacaacgttgacctttgttacaattagattcaatttgaatttatgtttttgaatgctttcttatctcacgatttaacagggaatagttcaggctgtgttgatgtatcaaacccgcagaacataccaaaacagcaataacattgcggtagtgcatcttttaaaaccagcgtggcgttaaccgattcaccaggaataatgaatggaacttttgacccaattgctgcaagccctgtgggcgcaggattttgaaaccctggccaatccaagcatgattggcatgttgtattttgtcttgtttgtaattttgttccttgaaaacggcttgcttccggcggcctttttaccgggcgacagtttactggtattggtcggcgtgttgattgcgaaaggcgcgatgggctatccgcaaacgattctgctgctgaccgttgccgccagcctcggctgctgggtcagctatattcaggggcgatggctgggcaatacccgcaccgtacaaaactggctatctcatttacccgcgcattatcatcaacgcgcacaccatctttttcataaacacggtttaagcgcgctgttaattggtcgctttattgcgtttgtcagaacactgctgccgacgattgccgggttaagtgggctgaataacgcgcgctttcagtttttcaactggatgagcggtctgctgtgggtattgatcctgacaactctgggttacatgctcggcaaaacgccggtatttttaaagtacgaggaccagctgatgagttgcctgatgctgctcccggtggtgctgctggtgtttggcctggcaggttctctggtcgtgttatggaaaaagaaatatggaaatcgggggtaagggatgcaaatacctcgcatgagccttcgccagctagcctggtccggcgctgttttacttctggtcggcacgctgttgctggcctggtccgcggttcgccagcaagagtctacgctggcgattcgtgccgttcatcaaggcacaacgatgccagacggttttagtatctggcatcaccttgacgctcatggcattcctttcaaaagtatcacccccaaaaacgacactctgttaattacatttgactccagcgaccagagcgccgccgcaaaagcggtcctcgacagaacattgccccatggctacatcattgcgcagcaggacaataacagtcaggctatgcagtggctgacccggttacgggataactctcatcgcttcggataacttcctgttatccgaaacatatcactcactttggtgatttcaccgtaactgtctatgattaatgaggcggtggttaacactaccgcttcgttgtctggacaatcgttcctttgtaataggtccgaatcacaatggaaggttcaagaatgaaataccgcatcgctttagctgtttctctctttgctcttagtgccggtagttatgccactaccctgtgtcaggaaaaggagcaaaatatccttaaggagatcagctatgccgaaaaacaccaaaaccagaatcgtattgacggtctgaataaagccctgagtgaagtccgggccaactgtagtgatagccagctgcgtgccgatcatcagaagaaaatcgcaaagcagaaagatgaggtggcggaacgccagcaagatttagccgaggcgaagcaaaaaggcgatgccgataagattgccaaacgcgaacggaaactggcagaagcgcaggaagagctgaaaaagctggaagcgcgcgactactaactcacaatagtcactacttactcacctggagaaaactatgagcaaagaacacactacggaacatctgcgtgctgagttgaaatccctttccgatacgctggaagaggtgcttagcagttctggcgagaagagcaaagaagagttgagtaagattcgtagcaaagcggagcaggcactgaaacagagccgttatcgcctgggtgaaaccggtgatgccattgccaaacaaacccgtgtcgcggcggcgcgtgccgatgagtatgtgcgcgaaaatccgtggacgggcgtgggcattggcgctgcaatcggtgtagtgctcggcgttctgctgagccgtcgttaattatggcggacactcatcacgcacaagggcccggtaaaagcgttctgggcatcgggcagcgaattgtttctatcatggttgaaatggtagagacacgtctgcggctggcggtggtggagctggaagaggaaaaagcgaatctctttcaacttttactgatgctgggcctgacgatgcttttcgctgcatttggtcttatgagcctgatggtgctaattatttgggcggttgacccgcaatatcgcctgaatgcgatgattgccaccaccgtggtgttgctgctactggcactgattggcggtatctggacgctacgtaaaagccgtaagtctacgttgctgcgccatacacgccatgagttagcaaacgatcggcagctgctcgaggaggagtcccgtgagcagtaaagtcgaacgtgaacgacgtaaggcgcaactgcttagccagatccagcaacaacggctggatctttccgccagtcgtcgtgaatggctggagacaacaggcgcttacgatcgtcgctggaatatgctgctaagtctgcgctcctgggcgctggttggcagtagcgtgatggcgatctggacgattcgccatcctaatatgctggtccgctgggccagacgcggttttggcgtatggagcgcctggcgtctggttaaaacgaccctcaagcagcaacagcttcgcggttaacttccctctggccggagccattccggccttatccctcaaattttttgaagatttttgacagttttccttgctaacaatcatcattcaccacgtttatgattctctccatcgacagcaacgacgctaataccgcgccattgcacaaaaaaacaatcagcagcctgagtggcgcagtggagagtatgatgaaaaaattagaagatgttggtgtactggtagcgcgcattttaatgccgattctgtttattaccgctggctggggaaaaattactggctacgcgggtacccaacaatatatggaagcaatgggcgtcccgggttttatgctgccactggtgattctgcttgagtttggtggtggtctggcaatcctgttcggtttcctgactcgcaccacagccctgtttactgcgggctttacgctgctgacggcatttttatttcacagcaactttgctgaaggcgtcaacagcctgatgttcatgaaaaacctgacaatttctggcggattcctgctgctggcaattaccggtccgggcgcgtatagcatcgaccgcctgctgaataaaaagtggtaagcacgcgctatacttaacgataaaaaacgaggaggaagctcctcgtttttgctattggaggagagaaaaatgggtcaactgattgacggcgtctggcatgacacctggtacgataccaaatctaccggcggtaaatttcaacgtagtgcttccgcatttcgtaactggctcactgccgatggcgctcctggccccactggcacaggcggttttatcgcagagaaagatcgttatcatctctatgttagtctcgcctgcccgtgggcgcaccgcacgctgatcatgcgcaaactcaaaggactggaaccgtttatttccgtttccgtagtgaacccgctgatgctggaaaacggttggacctttgatgacagttttccgggagcaaccggagacacgctctatcaaaatgaatttctgtatcagctttatctccacgccgatccacactacagcggacgagttactgttcccgtgctgtgggacaaaaagaaccacaccatcgtcagcaacgaaagtgcagaaatcatccgcatgttcaataccgcgtttgatgcgctgggcgcgaaagcgggtgattactaccctccagccctgcaaacaaaaattgacgaacttaacggctggatttatgacaccgttaacaacggcgtgtataaagctggttttgccaccagccaggaagcttacgacgaggcggtggcgaaagtgtttgaaagcctggcacgactggagcagattttaggccagcatcgttacctgaccggcaaccagctaaccgaagccgatattcgcctgtggactacgctggtgcgttttgatccggtgtatgtgacccacttcaagtgtgataagcaccgcatcagcgattacctgaatctgtacggttttctgcgcgatatctaccagatgccggggatcgccgaaacagtcaatttcgatcatatccgtaatcattacttccgcagccataagaccatcaaccctacggggattattagtattggtccgtggcaggatctcgatgaaccgcatggacgagatgttcgcttcggttaaaaaaaggcaccttacgaggtgcctctgataattagctaagtgcatgttgttcatgtcggatgtggcatgaacgccttatctgacatacaaaacattgtacattcaatagattgcataacccgcgcagaccagataagcgtagcgcatctggcgattttgcgcttgtcatcagtcttagcgcgccttcacggcactttattaattccttgaacgaatatttactgccatttcattcacgtctattcttaatttgctgctttaaaaacaagtgattgagcaaaattgaggcaaaaatggactggtatctgaaagtactaaaaaattatgtcggtttccggggtcgtgcgcggcgcaaagagtactggatgtttattctggtcaacatcatctttacgttcgtgctggggctgctggataaaatgttaggctggcaacgcgctggtggcgaaggcatcctgacgacaatctacggtattctggtgtttttaccgtggtgggcggttcagttccgccgcctgcacgacaccgaccgcagcgcgtggtgggcactgctattcttaatcccgtttatcggctggcttattatcatcgtctttaactgccaggcgggtacgccaggcgaaaaccgctttggaccagatccaaaactggaaccttaaaacaaatctgctcgccggatgtctgactcatccggcttttatcattatgttgatgaatgaataatttactaatgtttatttaaaatatttcaatgtcgttatataaattacctataaaaaataaccatgtatttatcttaaatatcaaaacctttataacatccgaaaaagaaagatacgaatagcatttacacaatacccggaatagactttcgtcacttttaattaaagggatgtttttatgcagtggtatttgtccgtattaaaaaattatgttggtttctctggtcgcgcacgtcgtaaagagtactggatgtttactctgattaacgccatcgtcggcgctattatcaatgtcattcaattgattttaggtctggagcttccatatctgtctatgctttatttgctggcaaccttccttcccgtccttgcgcttgctatccgtcgcttacacgataccgaccgtagtggtgcctgggccttgctcttttttgttccgtttattggctggctcgtgcttctggtttttttctgcacagaaggtacttctggcagcaatcgttacggaaacgatccgaagtttggtagtaattaatcttagaattggggcgatatttcgcccctttttattaacaataataaatattattttccgttaaaaagtttgggaatttcccgcagacaccaggatttcgcttcccccatactgtcacgacgccaggccataataatatcgatctcgctggtgctttccgggctgacgacacgcaaccgcccttccgcaatatctttttcgaccataggatacggcatcgtcgccacgccaagccccgccagtaatgcctgacgtttatcttcaatcgtgctcaccgttaagcgcggctgtttgtccagcagctgtacggtcaacaccgggcgctcacgagcggtatccgccaccgcaattccacgatatttcacacgcgtcacttcagataacggttccggctcctgatgaatcgggtgatcaggcgcggcaacgtagacgttcattaacgtatagagcttgcggctgttgatctcgctgctggaacgaaaatgcatatccggcgcgataacaatatccgcccgcccctgctccagccgttcccacgcccccgccagcacttctgtgatgattgccagttgggtattggcttttgccgccagtttgtcgattaacgggaaaaaggcaggtgtcggtaccagcgcttcggtcacaatggtgagatgcgtttcccaaccgcgcgcgagagcttccgcatcagtagtcagtttatctgcggcttccagcaaaacgcgccctcgctccaacaacatcctcccgacattggtgaatttggtacgatggccgctgcggtcaaacagcaccacatccagctcttcttccagtttttgcatggtgtagctaagtgcggaaggcacgcgtcccagctcatccgccgccgccgcaaaactgccccggcgatcgatcgcatccataacccgtagtgcttccagcgttaatgccctttctttggccatttcgttctcattcaggaaatttgaacataccgggcagaatatctggctaacaatgtagcgtccagccccttaccataaaaggaagtaaagagaggtcaagaattatgattactacccgaactgccaggcagtgtggacaagcagactacggatggttgcaggcccggtatactttttcctttggacactacttcgacccgaaattgttaggctatgcctccctgcgtgtgcttaaccaggaagtgctggccccaggtgccgcctttcagccgcgaacctatcccaaagtcgatattttaaatgtgattctggatggagaagcagagtatcgcgatagcgaaggcaatcatgttcaggccagcgccggagaggcgttgctgctctctacccagccgggtgtcagctatagcgaacacaatctcagcaaagacaaaccgttaacgcgaatgcagctttggctggacgcctgcccgcagcgagagaatccgctgattcaaaagctggcgcttaatatgggcaagcagcaattaatcgccagcccagagggtgcgatgggaagcctgcaattacgccagcaagtgtggctgcaccatatcgtgctcgacaaaggcgaaagtgcgaatttccagttgcatgggccacgcgcgtatttgcaaagcattcacgggaaatttcatgcgcttacgcatcatgaagagaaagcggcgctgacctgcggtgatggggcgtttattcgtgacgaggctaacattacgctggttgccgattccccactgcgcgctttgctgatagatttgcctgtctaattgtttttacagggagatgatgatgagtaaaaaattggccaaaaagcgccagccggtgaagcccgtggtggcgaaagaacctgctcgcaccgccaaaaattttggctatgaagagatgttgagcgagctggaagctatcgtcgcggatgctgaaacgcgtttagccgaggatgaagctaccgcgtaaagacaggttgccggatgcggcgaaaacgccttatccggcctacaaaatccaacaacattaacgaattaaacaacccgtaggccggacaagatgcgccagcatcgcatccggcacgatccccaaaacctggcgtttatctggccttgctcgccataatctcgataatctgccgatccgtttgctgcatgctatggcttgctaacgcacacaggttggcaatgctctgctcaacatcatgcgccacaatcccttcattgccggtcacggcggtatcatccagcgccattaacaccgctttccacgcagcgctagcactggtgctaaccttcatcgcgcagctgttgctcgcaccatcgcaaatcatgccgctgacatcgccgatcatactgctgatcgccatgctgatggtttcataacgcccatccaccagccatgccatcccggcggcggcccccattgctgcggtcgttgcggcacacagcgcagacaaacgcggtaactggttatggatgtaaattgcgctcaaatggctaagcatcagcgcacgcgccagccgttcatcatccgctccgaagtgttctgctaccaccaccacaggcattgttgcggtaatcccctggttaccgctgccggagttactcatagccggaagcgtagcgccgcccatacgcgcatcggatgccgcgctggtacgaatcacaatggaactagagagatctttcgccagcaaaccgcgctcgcactgtttttccagcgtcgcgccaatatgcagcccccacttaccgctcaaaccttcctggcttaacgcacaatttagcttcgcggaatcgagaataaagcggatcgccgcaaacgggacttcattgacgaacttcaggatctcagccagcgtcgttctggaaagcaccgtcagcggagactcttgctcgccctctgccacacacgcctgctgggtaaacaccacaccatcgtgcgtctcgatatgcacaatgttggtatgcccgccgacgatggtgacacacgcccacttctcaccgttccagactttggcgcgactgaagaggatttcatcgcaaggttcctggatcttaacggagactttccccgccgccagcagtgctttggcatcggcaattgcctgcgctgttgcgtctttcagcacttccagcccggcgttggcatttccacctaacgcccccagcgccgccgcaatcggcagccccaccattcccgtgccgggaacggtgacgcccagaccgttcttcatcagatttgggctaacccaggcttctacacgttcaaccggaccttccagttctgccgcagcaaccgccgccgccagcgccagactaatcggttcagtacatcccagcgccggttttacttcctcctgaacggcgaggatgtaacgctgccataacggatttaaagtgctatcaaacatattaaaaaccttaaaatttcaggtaaatcaagaaaatgccaggaacggagaaacacacagcaacaaaccagtgacgataatcaggtacagagacatccctttgtatttgtgcaatgctggtactttgtaaaccagccacgccgggatcaggcaccctaccatgccgaaaatcgggctacagatagaggtgaagctcaacaccggtgcgttcagtacgatggcgctccaggccagcaaaatggcgaaaatcatgatgccgcgctgaacgagattttcgttaatcttctcggcaggcatcttgcgacgcaggatgttcattacgatcccttgcgttgcttcgcgaaagcctaaatagacgccaaagaatgcagtcatgacagcaaagatattgagaatgacgctgaccactttcacccacgctgcgccgtcaccgctaataaactgtgcggcaatcgccagcgcggaaatattctgctcataggcttttaccgcttcgtcatgtcccatcgccagcgtgaagctcacggcgtagaaaaagacggtgacaaacaaaatgccaaacgcgatattcattgcccgcaatgctttatgccgcgccacttcaatacttttttcccggctgcgataagagatcaccatcggacttaacgtctggataaacagaatgctcgtcagggtaaacggcagcgtaataatggcgtttttcaccagcagccccagcggcggtaggctaccgacgttatacagatgccacattcccaccatgctcacgcccagcgccgcgaccaccagcagcttggtcagcaccatgccggtgctaattttgaataacaatttctcgccgcgactggagatcgccaccagaatgcaaatcagtaccagaccataaaagggactgtcactcagcaacccttccgtcacgccgaaggtatgcaggtaggaagcactatcgttggtgatggcggtggaatagacgaacatccaaatcaccagcattacgaaatagagcgcacctaacaggatgccccagtttttacctaaataaccgctaatgacgctcgggtaatctttacattctggactttctgccagcgtattaataaacaatcgctgaaacagatacattgccgggtaaccaatcacgctactgagcaaaaatacccacaatcccatcaaaccgacctgcaccgggagaaaaacaatccccgcgccaatcgccatcccgatactcataatcacccagccggtgtcagtactgtcgaatttgatcgcttctcgccactcgctctcactcattccagcacgacccgccggggtcgaagcgtctgcaatgacgcctttattcgatgcaatttccataatttctcgctcaatattttgtagggcttattatttttttccgagccgcatcaaggcgatatgcggtctacgtttttgcaggcgagttattagaataaagaaatgatacgcgcgaggtcagagaaaatcttcacaatcaagactttgaaataacggagatggataagaattttctactaaattaatcgcaggagaatattcattctctatttgcggcagatcacaaaaaaaaggtgcacatttgtgcacccaaggatgaaagctgacagcaatgtcagccgcagaccactttaatggccagtcctccgcgacttgtttcgcggtatttatcgttcatatctttgccggtttcatacatcgtctcgatcactttatcgagactaacacgcggtgcgctggtgcggcgcatcgccatccgcgcggcgtttactgctttcacggcattaatggcattacgttcaatgcacgggatttgtacctgtccggcaaccggatcgcaggtcagcccaaggttatgctccatcgcgatttccgccgcattgcatacctgcgccggactgccgcccagtagttcagttaaccctgccgccgccatactacaggccacgccaatctccccctgacagccgacttccgcgccagagatggaggcgttcattttatacagcgcgccaatagcccccgcggccagaaaatagcgggcaatactccgctcgtttaccggacgacggaacttatcgtaataagccagtactgccggaataatgccgcacgcaccgttagtcggtgccgttaccacgcgcccgccagctgcgttttcttcactaaccgccagcgcgtacatgttgatccagtcgatgacattcatcggatcgttagagatgttatcgctggaaaccagctgacgacgcagcgctacggcacggcgcggcacattgagcggaccaggcagcacgccttcagtgttcatcccacgttcaataccgtcatgcatcacttgccagatacgggcaaaaccggcgtcaatttccgctttgctgcgcagcgctagctcgttgtgcatcatcagaccagatatagacaggccgttgtaatcacacattttcagcagttcacctgcactgtggaaatcgtaaggtacggacgtttcgacatcgtggctcaggccgaagtgttcttcttcgacaataaacccgccgccgacagagtaataggttttacttaatagctcttcctgtcccttccaggcagtgatccgcattccgttctcatggcgaggcaacatttcgggatggaagataatgttctttgctacaggaaaatcaacaatatgcgcaccagatgccactggcagccgcccgctgcgcgttactaactctataaatgcagggatctcatcaatgacaacatcctgcggactgtttcctgccagtcccatgatgatggcgacatccgtggcatggcctttgcccgtcagactcaagctcccgtacagatcgaccacaatatggctcgtcgcggttaataagccgctactttccagccgatcaataaaactttttccggcattcattggccccacggtatggctactggagggaccaatcccaattttgaaaatatcgaatgcactaatcatatccacaccctcggattgccgttcagtgaagtggagcggaacgaccttacgaccgtcccgctcacgaggctttacgcactacgtactgcgatggcttcaatttccagcttcacatctttcggcaaacgcgcgacctgcacacagctccgggtcggataggtcgcctgatgctcatcgaagaactgcttatagacttcgttgatggtggcaaaatcattcagatcggtgataaacacggtcatcttgatgatatcgcccacgctcagcccggcagcaaccacgatcgctttgacgttttcgaggcttaaacgcgcctgatcttgcacatcagccgggatctcaccggtctgtgggcaaaccggtatttgcccggaggtgaagaccatgctgcctaaatcaacgccctgaacataagggccgattgcgcctggggcacgttgcgtttcgataatctttttcatacatcctccggcgtcagagcgcctgggtaaaggtacgactaataacatcctgttgctgttcacgggtcagtgcgttgaagcgcacggcgtagccagagacacggattgtcaggttaggatatttttccgggtgctcgatggcatccagcagcatttcccgattcattacgttgacgttgaggtgttgaccgccttcgacatccgcttcgtggtggaaatacccatccagcaggccgacaaggttggttttacgtactggatcttctttgcccagcgccgcaggaacgatactgaaggtgtagctgatcccatctttggcgtaggtgaacggcagtttcgccacgctcgtcaaactggccacggcacctttgcggtcacgaccatgcatcgggttagcgcccggcgcgaacggtgttccggcgcgacgaccgtccggcgtattaccggttttctggccgtacaccacgttagaagtgatagtcagaatgctctgggtagggacggcgttgcgataggttggcagcgctttaattttcttcataaagcgttcaaccaggtcgcaggcaatgctgtctacgcgctcgtcgttgttgccgtactgcggatattcaccgtcgatttcaaagtccaccgccaggccgttttcgtcacggattggtttcacgcgggcatatttgatggcagacagggagtccgtcgccacgctcaggcccgcgatgccgcatgccatagtgcgatagacatcacgatcgtgcagcgccatcaggctagcttcgtagctgtacttgtcgtgcatgtagtgaatgatattcagcgcgctgatgtactgcaccgccagccagtccatgaagtgatcgaggctgtccatcactttgtcgtaatccagcacgtcgtccatcagcggtgctgttttcggcccgacctgaatcttcagcttctcgtccaccccgccgttaattgcgtagagcagcgttttcgccaggttagcgcgtgcaccaaagaactgcatttgcttaccaatcaccattgggctgacgcagcaggcaatcgcgtaatcgtcgctgttgaagtcagtacgcatcagatcgtcattttcatactgcaaggaagaggtgacgatgctcacctgcgcggcatattttttgaaggcaatcggtaattcttcgctccaaagaatggtcaggttaggttccggtgccggccccatagtgtgcagggtgtgcaaatagcggaaggagtttttggtcaccagcgtacgaccgtccagccccatcccgccgatcacttccgtcgcccagattgggtcgccggagaacaggctatcaaattccggtgtacgcaggaagcgtaccatacggatcttcatgatgaagtgatcgatcagttcctgtgcctgctgctcattgagtacgccagctttaaagtcgcgctcaatgtagatatcgaggaagcttgccgtgcggcccaggctcatcgcgccgccattttggcttttcactgccgccagataagcgaagtagagccactgcaccgcttcctgcgcattctgcgccgggcgagagatatcaaagccatatttcgccgccatttcctgaatctgcaacagcgcatgacgatgctctgccagctcctcacgcagacggatggtggcttccagatcctcgcctttttccagacgagactggagatcggcaaattgcagttcgcgttcacgtaccagataactgatgccatacagcgctacgcggcgatagtcaccgataatgcgcccacggccatagccatctggtaaaccggtcagcacgccagatttacggcagcgcagcatatccggactgtaaacatcaaatacgccctggttatgggttttacgcagatcggtaaacagatattcaaattcactgtccatttctcggccataggcgtggaaactacttttaatcatattaatgccaccgaacgggtgtagcgcacgtttcaacggcgcatccgtttgcaggccaacaattttttccagcggctggttaatatatcccgcatcatgagcggtaattgtggtggcaatattggtatcgaaatcaaccggcgcgtgggttgcattttcgatacggatgccttccattactttttcccacaattccgtggtggcaggcgtcgcttcggcgaggaaagattcatcgccttcatacggtgtatagttatgttgaataaaatcgcggacattaatttcgtttttccagtccgtacctttaaagccaagccatgcgtcggcgtacagcttatcgctggtatcaatatctaccttcatgaaaaataatctctctacaatacttcaactaaattatgcaaattctgcgggcgcgttaactttgcctaaatgaatggcatccaaagcaatcattttttcttcgttagtcggaataacggcacaaatgacacgcgcattttcactggaaacaattcgctcaccacaggagttagagcgattattcatttctgtatcaatctctaagcctaatacagccaaatgttccatgaccagacgacgaattaagctactattctctcctattccgccggtgaatataattccatccaggcgacgtaaactagctgcgtgtccggcaatatgacgggcaattcggtgaacaaaggttttaattgccagttgcgcgcgttcgtgaccttcatgccaggctttttccagaacacgtaaatcgctagaaagaccggaaatacctaataatccgctctctttattcactacgcgttccaggtcacccaggctctggttggtttggctggcgacccaggacatcgcaccaaagtcgacatcgccactgcgggtacccatcatcaagccttccagcggcgtcattcccatactggtatcaacactctgaccgttgcgaaccgcgcagatactcgcgccattgccaagatgcgccacaaccaggccggagtcatcttccgccagattcagcaggctatgtgcgcgctgggaaacatagcggtggctcgtgccgtggaaaccataacggcgtacacctaactcttcataatatttccacggcaggccgtataaataagcttccggagccatcgtctggtggaaactggtatcaaataccgccacctgagttacgcccggaaataattgctgcgcgctttcaataccacttaaattggcgtaattatgcaggggtgccagtggagaaacgcgacggatattatcaatgacttcatcggtaataatggcggactcggtaaaaatactgccgccgtgagcgatgcggtggccaattaaggccacactgtcatttaaattccgtttttccagttcaaatgcaattgccttcaatgcaccttcgtagctgtggtgagccagcggtgctggctctcccccatttacggataagaatgcattttcgctgttaataccgtcggcaataccactcattaatacttcacagtcgctggcatcgagcacggaaaacttaatgctagagctaccacagttaataaccaaaacaaccggaaattcattcatctcttttctcatcctgagttacggattaaaacagtttgtatacgatgttcaggatggtcagcagaccaatcacggtaacaaacacgttatccagacgaccacggtatttcgccagagacggcgctttacggatggcatacatcggcaacaggcacagcagggatgcgataatcggtgcgcccatggcttcaatcaggtcaaggatgttcgggttggcgtaggcaacaacccaggtggagcccatgatgaagatcatgctgatagtgttcagtttacccaggctcactttagttttgtcgcctttataaccaaacttcaggaccaggccattcagaccttccagcgttcccagatagtgaccgaagaaagatttgaagatagccacgagtgcgatgatggaagccgcatattccagtgtaatcgcgaacgttgttttggtaccggtcatggacgcaaagtggttagccagataagaaagcactggaatattctgcgctttggcttccgccatgttggccggagacagagtaaacaggcagctaaaggcaaagaacatcaccactgcaaccatcagcatgctggcacgagaaatgatttgggaacatttacgttcggtgaagtcgcgaccgaagtctttctcatactcttcacgcttagaaaccacgaaggaagagacgattgggctgaagttaaaggagaaaaccatgatggaaatccccagccagacagtgatcaggataccgtcatgaccggttaagctcaggctaccgaggtcaacctggtcgataactgcagagttccagtaagggatcaggctcaaagaaatcagcaccaggctggcgataaacggccataccaggtagctcatcactttaaccatcagatccttaccaaaccagatgacgaaagccatcagcagcaacaggaacagcgccacaaagccgcgattcagcggtgcaaagccgagctggttttcccagaacgtcataaaggtattggtaatagtaacgccataaatccacagcagtgggcaaatcgcgaagaagtacaggaacgtgataaccacgccgccagttttaccaaaatgctcttccaccgtttccgtaatgttgccggaagggttagagccagaaagacacagacgcgccagcgcccggtggcaataaaacgcgatggggtatgccaataccaacatcagaagaatcgggatcagtccgccaaaacctgcgcggatagggaagaacagcaccccggcgccgattgccgtaccaaacaagcctaacgtccatgtggtatcacttttacgccaggagctttgttttgtctggctggatacaatgctatcactagtactcatatcctatcctcaacgaattaattaagcgtcaacgaaaccggtgatttgagagacgcgagaaagatcgatattgccgccggaaataatactgacggtttttctgttttgaatatattggtctaatttaccgcttaataatgcagcacatgccagagcgcctgcgccttcggtgacgactttattgcgctgaattaaggcaatcatactgtttctgatttcgtcttcgctgaccagcacgatgtcatcgactaattcacgaacgatttcgtaagttaaattacccgggcgggagacatcacaaccatccgccagggtgccggtagttcggtgcgtggttatttctccggagtggaaagaagccgccatgccgtgaacgttttcagactgtacgccaataacacgaatggtcgggttaatagatttaattgccaccgcaataccagcaattaaaccgccaccaccaattggcacaatcacgttatcgacatcatagagatcttccataatttccagaccaatcgttccctggccagcaatcactttcggatcatcgtaaggtgggataaaaatacggccttccatttcgacaatttcgctcactttagcgatagtgtcgttgaagttatcaccatgcagaacgacttctgcggagtagtcgcacgttgccgctactttggattttggcgcaccttttggcatcaccactttaccgtcgatacccagcatcgcgcaggagagggaaaccccttgcgcatggttgcccgcagaacaggccaccacgcctttgcgtttttccgcatcggtcagactacttaatttattaaatgcgccacgaattttaaaactacccgtacgctgcatattttcaaacttcaggaatatttcacctttgcaacgttcactaaaatagttggagcgaggcatgcctgttttataaattcgcccagccagtcgttgtttcgcttcaataatgtcatcaatagcaaccggcagatcgtatgtaatatgcattataaaacctcttcgcctgaattaaatatgtaggtaaccgtaaccgacacctgcaagacagacaggtggattatttatgtttaaataaaaacaaataattaaccaacttctattaattgccttcgtctacacccattataagaactatactctttggctaattccaccaaaacgcttgctgcttttttaatacgataatttttgctccataccgcggcatattgtgccacaggtaatgtttcttcaaccggaatagtaataaattgattagaaccaaaaggactcgtcatatcacaaggaattacagttaagaaatcagcattgagaacaagattataaattgtcacgacactgtcggttttaacgatgttttcaatactgatgccatttctttgtaacgtagtaagcagttcgctgtagtaccccatattagtttgtggcaacacccactgttcgttcttcaagctctccagcgtggtggtgccggtgcatgttcgggacttactggctaccagcacaaactcggactcgaacagcggctcaacatgtaaatcctgaagcttcatttctgcacttaacgtaccaatcgcaaaatccagtcgaccgtcgcggattgccggtaagaagctagacagttgcgcttcatacatagaaacctgcgctttcgggaacacctctttgaacttgttgatcatcccactcataaaagtaaaaccaatcaaactaggaaaaccaaaactgacttccaccaccgcctcagaagacataccgcttatctcattaaccatatttttcatttcacgggtaatggattcggaacgggagagtaacaattgaccggcaggtgttaatgttacaccggtatttttccgcaccactaattccacaccaaaataatcttcaatatcgttaatgattttactgacggccggttgagttaaccctaattcttttgcagcgctgccgatagaaccacttctaatgacttcctgaaagactaccaggtgctgcgttttcggaagaagaatagtgctcataacgacctacgttaattacctcattgacggcatgaagtgtatcaaaatgaaatgaacaggatatgtgcgaccactcacaaattaactttcaatactttccagagtatcgttattacaattaaatacctttaaatatcaacaagttaaagtataaaaatcagcataaaccctgatttttgtcaaaaaaaatgacggggataaccatattttatggcgataacatcattcgttatgtggttaatacaaaaaaggggctgagaccatatttcaagcaattaccggataattaccaggcaaaatttgagttaaatttaatgagcaagttcagtaattttattataaataaaccatttagtgtgataaataatgcggcatgtcacatttttagtcgctatttgttggagaacaaacatttattttatcaatattttaaaattagcaatacatgtattgatcatctcgaacaattgattaacgtcaactttttctcttctgacaggacgagtttttgtgaatgcaatcgttttccataaattcttctcccctcataggcgacgaatagcattttgtgttgaggatcacaaaacgaataattgctgatcgccgcgataaggtcagacaaagacaacaagggaaattttcacagagcttttgatcggcgtaggccacagaatgttgcttcgtttactgtaacgccgggtaaatgagcgttttttgatagtgcgaaagaaccctgcgaggaaaataagcatctattattgtttgtcatgatgacaaggcaggcatcaatgaaaggcttcccaattgcgcatatttttcaccctagtatcccgccaatgcacgcagtggttaacaatcacaatagaaatattgattattggacggtaaaaagaaagtttgcagaaattgtctccaccaatgacgttaataaaatttacagtataagtaatgaactgcggagagtattatctgcaataactgcattgaatttctatcatggcgatgttccttctgtcatgatccgaatccaaccggaaaatatgagtccattcattatagatatttctacaggagaacatgatgattatatcatacaaacattagatgtaggcacttttgcaccttttggtgaacaatgtacttgcagtgccgtcaataaaaaagagctggaatgtattaaggagacgatttctaagtattgtgcaaaattcacccgaaaagaagccatcttaaccccccttgtgcactttaataaaaccagcattactagtgattgttggcaaattctcttttttagtcccgatcattttaataatgatttttattgattatttataaaggataaaataatgttccctgttagtagtattggtaatgatattagtagtgatttagtccgtcgaaaaatgaatgaccttcctgaaagcccaacaggaaataacctcgaagcactagcaccaggtatagaaaaactaaaacagacctctattgaaatggtcactttacttaacacgttacaacctggtggaaaatgcattatcactggtgattttcaaaaagaattagcgtacttacaaaatgtaattctttataatgtcagctctcttcgtctggattttttaggttataacgcccaaattattcaacgaagcgacaatacttgtgaacttaccattaatgaaccgttaaaaaaccaggaaatatccacaggtaatatcaatattaattgcccattaaaagatatttacaatgaaatcaggaggttaaacgtaatttttagttgtgggactggagatatcgttgatctatcctctctggacttacgtaatgtcgatttagattattatgatttcacagataaacatatggctaatactattttaaatccttttaaattgaatagtacaaattttactaatgccaacatgtttcaggttaattttgttagtagtacacaaaacgccacaatctcctgggattatttactaaaaataacgcctgttttaataagcattagcgatatgtattctgaagaaaaaatcaagtttgtcgaaagttgtttaaatgagcctggagacattaccgaagaacaattaaaaattatgagatttgcaattataaaatctataccaagggcaactcttacagataaattagaaaatgaattaacaaaagaaatatataaaagcagtagcaaaatcatcaattgcttgaacagaattaaattaacagagatgaaagaattcagtagtgaaaaaatatatgattacatcgatataatcattgaagattatgaaaataccaaagaaaatgcttatctggtcgtcccccaaattaattatactatggatttaaacatagaagactctagcagtgaagagttacttagtgataataccctcgagaaagacgaaaattctccggacaatggctttgaggtcggggaatataacacatatgaagcatataacagtgagaagcaatattttaccagagaggactatacgtatgattacgaccttttaaatgcaatataaacttaataacttcttacaaagtctattattaataccgtagatatttattcatcttaccctgtgcaccaaaagcaaaaactcactgacgcgggtttgaaactgatggcaaccgcaaaaatgcctgatgcgctacgcttatcaggcctacgccatctctgcaatatattgaatttgcgtgcttttgtaggcaggataaggcgttcacgccgcatccggcatgaataaagcgcactcaacaatctgaaacccgccggaacggtttattacgtacatcaggtaaaactgaccgataagccgctttcttttgggtatagtgtcgtggacagtcattcatctttctgcccctccaaaagtaaaaacccgccgaagcgggtttttacgtaaaacaggtgaaactgaccgataagccgctttcttttgggtatagtgtcgtggacagtcattcatctttctgcccctccaaaagcaaaaacccgccgaagcgggtttttacgtaaaccaggtgaaactgaccgataagccgctttcttttgggtatagcgtcgtggacagtcattcatctttctgcccctccaaaagcaaaaacccgccgaagcgggtttttacgtaaatcaggtgaaactgaccgataagccgggttctgtcgtggacagtcattcatctaggccagcaatcgctcactggctcaagcagcctacccgggttcagtacgggccgtaccttatgaacccctatttggccttgctccgggtggagtttaccgtgccacggactgttaccagccgcgcggtgcgctcttaccgcaccctttcacccttacctgatcccgcttgcgcgggccatcggcggtttgctctctgttgcactggtcgtgggtttcccccccaggcgttacctggcaccctgccctatggagcccggactttcctcccctccgcccgtctcccccgaagaggacgacgacgaagcggcgactgtctggtcagcttcggcgcgcagtatagagggtttgcgcgcccttgtcaccccgcgttgcgcattccaatcgccagtgtcgcggcgatattacgactagcacggcagatattgtcataagccccgcggaatgcttcgtccaacgtacctatgctggtcaatacgctgaagaccgcatcaatgccatgctgatgtacaacgccaacatcatcggtcaggctacccgcaatgccaatcaccggtttatggtacttcttcgccacgtttgcgacaccaatcggtaccttcccgtgaatactctggctgtcaatacgcccttcaccggtgatcaccagcgtacaatcgtgaatatgttcctccagattcagcgccgtagtgacgatttcaataccacttttcagttccgcaccaagaaacgccattagcgccgcgcccataccacccgcagctcctgcaccggggacatctttcacatcaacatgcagcgcttttttaatgacctcggcatagtgagagaggttattgtccagctcaacaatcatcgcttcactggctcccttttgtgggccaaagatgcggcttgcgccgttatcgcccaccagcggattggtgacatcacaagcgacgcgaatgacgcaatcttttaagcgcggatcgaggccggaaatatcaatatcattcagagtattaagactaccgccgccaaaaccaatttcattgccgttggcgtcgcataatttcgcccccagcgcctgtaccatgcctgcgccgccatcatttgtagcgctgccgccaatgccgataataatgtttgtcgcaccgctctccagcgcctgcaggattaactcgcctgtgccgcgactagtggtcacgagtggatcgcgtttttccgcaggtaccagctccagcccactggccgccgccatttcaataaacgcggttttgccatcgccggagatcccccaactggcattcactttctcgcccagcggccctgtaacccaggcgtgacgttcagccccctgggtggctgcaatcatcgcttccaccgttccttcgccaccgtcggcaaccggaacagaaacgtactgtgcatcaggaaaaatttcccgaaatcctttttctatcgcctgcgcaacctcgctggcagataaactttctttataagagtctggggcgattacgattttcatacctatgcctgttaccacatgacgccggagggcgtttctcttattcggcctggattccaggcccggattgcaatacgccatccgggcacgacgtcattaacgagtaacttcgactttcgccagtttttcgtagtagcacgccagggcgctatgatccgccgttcctaaaccatctgctcgcagtgcctgcatcatctccataaccgcagctgtgagcggcagttgtgcgccgacgccgtgagaagtatccagcgcattcgccagatccttaatatgcagatcaatacggaagcccggcttgaagttgcggtccatcaccatcggcgctttggcatccagcacggtactgcccgccagtccaccgcgaattgcctgataaaccaggtccgggttaacgcccgctttagttgccagcgttaacgcttcactcatcgcggcaatattcagcgccacaatgacctgatttgccagtttggtgacgttacctgcaccgatttccccggtatgcaccacggaacccgccatcgctttcatcaaatcatagtatttgtcgaaaatagccttgtcgccgcccaccatcacactcagcgtaccgtcgatggctttcggttcaccgccgctcaccggagcatccagcatatcaatgcctttcgctttcagcgcttcgctgatttcacggcttgccagcggtgcgatagaactcatatcgatcaataccgtacctggcttcgcgccttcaataatgccattctcacccagcgccacctctttcacatgaggggagtttggcagcatggttatgatgacgtcgcactgttcagcgatcgctttagccgtagacgctgtttctgcacctgcagcaatcacgtcagcaatagcttctgggttacggtcagcaaccaccaggctgtaacctgctttcagaaggtttttactcattggtttacccataatccccaggccaataaaaccaactttcatagtcatatcaatcatctctcttgttgcggtggtggttattttttaaaggtatcagccagtttctgagtggcagagcggaagacgccgagatcgctgccgacagccacaaacgtcgcgccccattccagataacgacgcgcatcggcttcgaccggcgcgaggataccgctgggtttgccgtgcgcgctggcacggttaaaaatgtgctgaattgctttttgtacatccgggtgacttgcattgccgagatggcctaatgccgcggccagatcgctggggccgacgaagatgccgtctacgccttcggtagcggcaatggcatcgacgttatctacgccctgctgactttctatctggaccagaatagtgatgttcttgttgctctgagcgaaataatccgccacggtgccaaacatattggcgcggtgagaaacggagacgccgcgaatgccttccggtgggtaacgggtacttgccaccgccagctctgcttcctcttttgtttctacaaaaggaatcaggaagttatagaaaccgatatccagaagacgcttaataattaccggctcgttggtcggcactcgcactactggcgcgctggcgctgcctttcaaggccattaactgcggaataaacgtggagatatcgtttggcgcatgttcgccatccagcaccagccagtcaaacccagccaaaccaagaacttcagtgctaatcgggttagagagtgcactccagcaaccaatttgtacctgtttcgcagccagtgcggctttgaatttattcgggaaaacatcgttattcatcgcttatacctttgcttatttctgcaattccatacgtttaatgtcgccaactacgaagaggtagcagaccatcgccatcagcgcactacatcccacgaaaaccagtgctgcattgaaggagtgcagttcacttaccaggtagccaatcaccagtggagtgacaatggaggcaacattgccaaagacgttaaagacgccgccgcagaggccaacaatctctttcggcgcggtgtcagaaatcaccggccagcccagcgcaccaaatcctttgccaaagaaagccagcgccatcagcatgaccaccagcgtggtgttgttggtgtagttacataagatgatggtggaagccagcaacattcccagcacaatcggtagcttacgtgccagggtcagggataaaccgcgtttgatcagataatcgctgaagacacctcccagcacgccgcccgcaaaaccacacagtgctggaatgctggcgaccagacccactttcagaatgctcatgcctttttcctgcaccagataaatcgggaaccaggtgaggaagaaccaggtgatggtgttgataaaatattgtccgaaaaatacgcccagcatcatgcggttagagagcaattgcttgatgtaatgcagtttgggtccgcttgctgccgcactgcccggctttttgtggtccatatcgaccaccgcgccattttcagagataaacttcagctcttccgcagacatacgtgggtgatctgtcgggttatgaatcaacttgatccacagcgccgtcagcacaaaaccaatcacccccataacggtaaagacgtgctcccagccccaggcgaaagtcagccagccaagcagcgggctaaagagcgccaggctgaaatattgcgcgctgttaaagatggcggaggcagtaccacgttctttcgtcgggaaccaggcggcgacaattcgggcgttcgccgggaaacttggcgcttcgctgaagccgagcataaagcgcataaagaacatggagatccctgcccaggccagcgggaacatatcaacaaagccttgcaggaaggtgaataggctccagaaaaagaggctgtaggtgtaaacttttttgctgccaaacttatcaagcagccagccgccggggatttgcatcagcaagtaggcccagccaaaagcggagaagatgtaacccatgctaaccgcacttaactgcaactcttttgccacttcggtaccagcaatagacagcgttgcacgatcggcgtagttaacggcggtaacaataaaaataatcagtaatattaaatagcgggtatgcacgcctttctttttttcgtcaacggtgtccagaatcattttatttacctcgggtacttatgctgatttttattattatggggaaggtgttatttatgagtttcatttatgccgtaacgacaatgaactcgggaattagtataagcagcgcgagaataataatcattgtgcaaatgctaatttaattaatactatttaaatattattttgagcatatgcacataaggttgcgcgctaaagcacagatttgcgctttaccttaccgggcggcactgcaatccctgaaatgattgacattgatcacatttctgcgtttaaactcctgacattcttatttcacccaatgaagtcatttatttttaaatgagaccaggtcctcattttaataacccctggctggagaatattgcacaatggccaacatcgaaatcagacaagaaacgccaactgcgttttatataaaagttcacgacacagataatgtggcaattattgttaatgataatggcctgaaagcaggaacgcgttttccggatgggctggaattaattgaacatattccccaggggcataaagtcgcattgctggacattccggctaatggtgaaattattcgttatggcgaagtgattggttacgccgtgcgtgcaatcccacgcggaagctggatcgacgaaagcatggttgtactaccggaagcgccgccgttacacacgctgccactggcaaccaaagtcccggaacccttaccgccgctggaaggatacacctttgagggctatcgcaatgccgatggcagcgtgggcaccaaaaacctgctcggtatcaccaccagcgtccactgtgtggcaggcgtggtggactatgtagtaaaaatcattgaacgcgatctgctaccgaaatacccgaacgtcgatggcgtggtggggctgaatcatttgtacggttgtggcgtggcgattaacgcaccggcggcagttgtacctatccgtaccattcacaatattagcctgaatcctaactttggcggcgaagtaatggtgattggcctgggttgtgaaaagttgcagcctgagcgcctgctgactggaacggatgatgtgcaagctattccagtagaaagcgccagcattgtcagtttgcaggatgaaaagcatgtcggttttcagtccatggtcgaggatattttgcagatcgccgaacgccatctacaaaaactgaatcaacggcagcgagaaacctgcccggctagtgaactggtcgttggtatgcagtgcggtggcagcgatgcgttttctggtgtaacggcaaacccggcggttggctatgcgtctgatctactggtgcgctgcggcgcaacggtgatgtttagtgaagtaacggaagtgcgtgacgcgatccatctgctgacaccacgcgcagtgaacgaagaggtcggcaaacggctgctggaggagatggagtggtacgataactatctcaatatgggaaaaaccgaccgcagcgccaaccctagcccgggcaacaagaaaggcggtctggcaaacgtggtagagaaggcactcggctccattgctaaaagcggtaaaagcgcaattgttgaagtgctgagccccggtcaacgcccgactaaacgcggattaatttacgccgcgacgccagccagcgattttgtctgtggcacgcaacaggtggctagcggtatcacagtgcaagtgtttacgaccggtcgtggtacgccgtacggcctgatggcggtacccgtcattaaaatggcaacccgcaccgagctggcgaaccgctggtttgatttaatggatattaatgcgggcaccatcgctaccggcgaagaaactattgaagaggtgggctggaagttgttccactttattctcgacgtcgccagcgggaagaagaaaaccttcagcgatcaatgggggctgcataaccagctggcggtgtttaacccggcaccggtgacctgatttcttttggaacgtccctcgcaaaacatggccttagtgccatgtttttattgtttaaagcccccacgtccattaataatgcatttgcattaccttagttcaagcttataatttgagcagaaaacaggctgtaaaaggacagtgaatcatgcccgctaatgctcgctctcacgctgtactgaccactgaaagtaaggtcacgatacgcggacaaacaactatccccgcgccagtgcgtgaggccttaaaactgaagccaggccaggacagcattcattacgaaattctgcctggtgggcaagtatttatgtgccgactgggagatgaacaggaggatcatactatgaatgcatttttgcgttttctggatgcagatatccagaacaacccgcaaaaaactcgtccattcaacattcaacaaggaaagaaacttgtcgctggcatggacgtcaacattgatgatgagattggcgacgacgaataatggattttccacaaagggttaatggttgggcgctatatgctcatccctgttttcaggaaacctacgacgctttagttgccgaagtcgagacattaaagggaaaagatcctgaaaattatcagagaaaagccgccacaaagttattggcggtagtccataaagtgattgaggagcatatcacggtcaatccaagtagtccggcattccgtcatggcaagagcttaggctctgggaaaaataaagactggagtcgggtaaaatttggtgctggtcgttatcgtctcttctttcgttatagtgaaaaagagaaagtcatcattctgggatggatgaacgatgaaaacactctgcgcacctacggtaaaaaaacagatgcctataccgtattcagcaaaatgttaaaaagaggacatcctcctgccgactgggaaaccctcacccgagaaacagaagaaacccattgatggtgttcacaatgcccgccgaacgcattcgtgttgaccagcgggcatcctttctcactccccgaccagaatcacttcaaccccagcctttcgcagtccttccaggctatccgcaggaatgccttcatcaacaatgatcatgtcgatacgttgagtatcaatgatcttatgtaaactggaacgattgaacttactggaatcggtgaccacgatgatccgttccgcaacttcgcacatccgacggtttaaacgagcttcatcttcattatgtgtgctgacgccgcgctccagatcgatcgcatctacaccaagaaacagcatatcgaagtggtaattttgcaggctttgctcagcctgatcgccgtaaaaagattggctctgacggcgcaaatgcccgccggtcatcagcagctcaacgccttccgcttccagcaacgcattagccacgttcataccgttggtcatcgcaattacgtcagtgtgcttgcgcatcagacgagcaatctcaaaagtggtggtcccggaatcgaggataacccgatgacctggctgaatcaactcaacggcagctttcgcaacgctgcgtttcatcgcggtgttcagtgcgcttttatcttccacacttggctcgacactcggcgtcgtgctatcgcagatcaacgcgccaccataggcacgcacagcgatcccctgcttttccagaaacgccagatcgttgcggatcgtcacagtagatacgccatacaatgcgctcagatcgttaacctgcacactcccttgctgtcgcagacgctgaatgatctgttctcgtcgctcgctggtgccagtcactcgcttctcaccactagcgtcggtattactcatagtaagtcctttcgtaaaactttcgtttcatttcgttttgcctattaacgcctttctattaagcaaatgcaagcccaccttgcccattgacgcaagctactctcgtttcagtgactttcattatgtttcttttgtgaatcagatcagaaaaccattatctttcgttttatttttatctcaccatgacgcagtatcaactgaaacaaaacgaaagattaatatcgcagtaatctgaactggagaggaaagtgaaacatctgacagaaatggtgagacagcacaaagcgggcaaaacaaatggaatttatgccgtttgttccgcacatccgctggtgctggaagctgcaatccgctacgccagtgcaaaccaaacgccgttactgattgaagcaacctccaatcaggtagaccagttcggcggttataccggaatgacgcccgccgattttcgcggctttgtttgtcagctcgccgacagcttgaatttcccgcaggatgcgttgattctgggtggtgaccatctggggccaaaccgctggcaaaacctgccggccgctcaggcaatggccaatgccgatgatttgattaaaagctacgttgcggcaggattcaaaaaaatccaccttgattgcagcatgtcctgtcaggacgatccgattcccttaactgatgacatcgtggctgaacgcgccgcccgtctggcgaaagtggcggaagaaacctgtcttgaacactttggcgaagccgatctggagtatgtcattggtaccgaagtgccggtacctggcggcgcgcatgaaaccttaagcgagctggcggtcaccacgccggatgccgcccgcgccacgctggaagcccatcgtcacgcctttgaaaagcaaggtttgaatgccatctggccacgcatcattgccctggtggttcaacccggcgtcgaattcgatcacaccaacgttattgattatcagcccgccaaagcgagcgccttaagccagatggtcgaaaactacgaaacgctgattttcgaagcgcactctaccgattatcaaacgccgcaaagcctgcgccagctggtgattgaccactttgccattctgaaagttggcccagcgctgaccttcgccctgcgtgaagctctgttctctctggcggcgattgaagaagaactggtgccagcgaaagcctgttctggtctgcgtcaggtgctggaagacgtgatgctcgaccgcccggaatactggcaaagccactaccacggtgacggcaacgcgcgtcgtctggcgcgtggttatagctacagcgatcgcgtgcgctattactggccggacagccagattgatgacgctttcgctcatctggtacgtaatctggcggatagtccaattccgctgccgctgatcagccagtatctgccgctgcagtacgtgaaagttcgctccggcgagctgcagccaacgccacgggaactcattatcaaccatattcaggacatcctggcgcagtaccacacagcctgtgaaggccaataagcaaaacaaagaggaacacgctatgccaaatattgttttaagccggattgatgaacgcttgattcacggtcaggtcggcgttcaatgggtcggatttgcgggggcaaatctggtgctggtagccaacgatgaggttgccgaagatccggtacaacaaaacctgatggaaatggtactggcagaagggatcgccgtacgtttctggacgctgcaaaaagttatcgacaacattcatcgcgccgccgatcgacagaaaatcctgctggtttgtaaaacacccgccgatttcctgacgctggtgaaaggtggcgttccggtgaatcgcattaacgttggcaatatgcactacgccaatggcaaacaacaaatcgccaaaacggtttctgtggatgcgggcgatatcgcagcatttaacgacctgaaaaccgctggggtggaatgcttcgttcagggcgtcccgacagagcctgctgtggacctctttaaattactttgagggattcatcatggaaatcagcctgttgcaggcatttgcgttgggcattatcgcctttatcgctggcctggatatgtttaacggcctaacccatatgcaccgcccggtggtcctcggcccgttggtcgggctggtacttggcgatctgcataccggaattttaaccggcggtacgctggaactggtgtggatggggctggccccgctggcgggcgcacagccgcctaacgtgattatcggtactatcgtcggcacggcgtttgccattactactggcgtgaaacccgatgtcgcagtaggtgtcgccgtacctttcgctgtcgcagtacagatggggattaccttcctgttcagcgtgatgtccggcgtgatgtctcgctgcgacctggcaacaaacccgcgccgcatttgatgctggtgccgacggcctggtgcattgctataacgggatgacaggtttacatcaccgcgaaccgggaatggttggcgcgggattaacggacaagcgcgcctggctggaactgatagccgatggtcatcatgtgcatccggcggcaatgagcctgtgttgttgctgtgcgaaagagagaatcgtactgatcaccgacgcgatgcaggcagctgggatgccggatggtcgctatacgttatgtggtgaagaagtgcagatgcacggtggcgttgtccgtaccgcgtctggtgggctggcgggcagtacgctgtctgttgatgcggcagtgcgcaatatggtcgagttgacgggcgtaacgcctgcggaagccatccatatggcgagcctgcatccggcgcgaatgctgggtgttgatggtgttctgggaagccttaaaccgggcaaacgcgccagcgtcgttgcgctggatagcgggctacatgtgcaacaaatctggattcagggtcaattagctagcttttgatagtttgctcctttattgggccttcacttcccccgtaaggcctttctttttctttcgttttgatctgtgcagcggtgtcggatgcgacgctaacgcgtcttatccgacctacagttggtgaccgcaaggccggataaagcgtttgcgccgcatccagcaatcccttttgcttcctttatcttttctttcaacgatcacaaatttcgttttatttcttttttctccattgaactttcagtttcttttctatagattttaatcaacgaaagacatcaccaagtgaaatgaaacgaaaggcaagtgaaagcgacaacgcccgacgtcaagttcatcagactaaggattgagttatgccagaaaattacacccctgctgccgccgcaaccggtacatggactgaagaagagatccgccatcagcctcgcgcatggatccgtagtctcaccaacatcgacgcgctacgttccgcgctcaataacttccttgaaccgttactgcgcaaagagaatctgcggatcatcctgaccggagccggaacgagcgcatttatcggtgacatcatcgcgccgtggctcgccagccataccggtaaaaacttcagcgccgtaccgaccaccgatctggtcaccaatccgatggactacctgaacccagctcatccgctgctgttgatctccttcggtcgatccggcaacagcccggaaagcgtcgcagccgtggaactggcaaatcaatttgtaccggaatgctatcacctgccgatcacctgcaacgaagcgggcgctctttaccaaaacgcgatcaacagcgataacgcgtttgccctgctgatgcccgcagaaacgcacgatcgcggctttgcgatgaccagcagcattaccaccatgatggccagctgcctcgcggttttcgcacctgagacgatcaacagccaaaccttccgcgacgtggcggatcgttgccaggcgatcctgaccagtctgggcgatttcagcgaaggtgtgtttggttacgcaccgtggaaacggatcgtttatctcggtagcggtggcttacagggcgcagcacgcgagagcgcgctgaaagtgctggaactgacggcgggtaaactggcggccttttatgattctccaaccggattccgtcatggaccaaaaagcctggtcgatgacgaaacgctggtggtggtatttgtctccagccacccttacacccgtcagtatgatcttgatctgctggctgaacttcgccgtgacaaccaggcaatgcgtgtaatcgccatcgccgcggaaagcagcgacatcgtcgctgccggtccacatatcatcctgccaccgagtcgtcactttatcgacgttgagcaggcattttgcttcctgatgtacgcccagacgtttgcactgatgcagagcctgcacatgggcaatacgccggataccccaagtgccagtggcaccgttaaccgcgtggtgcaaggcgtaatcattcatccgtggcaggcataagaggatcgcattatgagcattatctccactaaatatctgttacaggacgcccaggccaatggctacgcggtgcctgcttttaacattcataacgccgagacgatccaagcgatcctcgaagtgtgcagtgaaatgcgaagcccggtgatcctcgccggaacgccggggacctttaaacacatcgcgctggaagagatctacgccctgtgtagcgcctattccacaacctacaacatgccactggcgctgcatctcgaccaccacgaaagcctggatgatattcgccgtaaagtccacgcaggtgtgcgcagtgcgatgatcgacggcagccacttcccgtttgccgagaacgtgaagctggtgaaaagcgttgttgacttctgccacagtcaagattgcagcgtggaagcagaactgggccgcctgggcggtgttgaagatgacatgagcgttgacgccgaaagtgcattcctgaccgatccacaagaagctaaacgctttgtcgaactgactggcgtcgacagcctggcggtagcgattggtacggcgcacggcttatacagcaaaacgccgaagattgatttccagcggctggcggaaattcgtgaagtggtggatgttcctctggtgctgcatggtgccagcgatgttccggatgaatttgtccgtcgcactattgaacttggcgtcacaaaagtgaacgttgccacagaattaaaaatagccttcgctggcgcggttaaagcctggtttgcggaaaatccgcagggtaacgatcctcgttattatatgcgcgtcggaatggatgcgatgaaagaagttgtcagaaataaaattaatgtctgtggtagtgcgaatcgaattagtgcataatcattagttttttatgatttatcccaatgtacttcccgattaatatcggggagtgccttaatggaaaaggagataactaaaccttaataaatacatcactacaatatcgcaacaataatatatttaaaaaaattatattattcaactttatggtgaggattacacaatgaccagtccaaatattctcttaacccgtattgataaccgtctggttcacggtcaggttggcgtgacctggacatccaccatcggtgcaaatctgctggtagtcgtggatgatgttgtcgctaacgatgatattcaacagaaattaatgggtattaccgcggaaacctacggctttggcattcgtttctttactatcgaaaaaaccattaacgtcatcggcaaagctgcaccacatcagaagatcttcctgatttgccgtacgccacaaacggtacgtaaattggtagaaggtggtattgacctgaaagatgtcaacgtcggcaatatgcatttcagcgaagggaaaaagcaaatcagcagtaaagtttatgtcgatgaccaggatctcacggacttacgttttattaaacaacgtggcgtgaatgttttcattcaggacgtccctggcgatcaaaaagaacaaatccctgactaaatctaaaatcgccttaatattggtttgaggtaataaaaatgcatgaaataaccctacttcagggattatccctggcggcgttagtttttgttctggggattgatttttggctggaagccttatttttattccgcccgataatcgtttgtaccctaactggcgctattctcggtgatattcagactggcttaattaccggtggtctgacagagttggctttcgccggattaacccctgcaggtggtgttcagccgcccaacccgattatggcgggtctgatgaccaccgtcattgcatggtctacgggcgttgatgccaaaacagcaattggtcttggcctgccgtttagtttgttaatgcagtacgtcattctgttcttctattccgctttcagtttatttatgaccaaagccgataaatgcgcgaaagaggcggatacggcagcgttttcccggcttaactggacaacgatgctcatcgtcgctagtgcgtatgcggtgattgctttcctctgtacttacctggcacagggggcgatgcaggcgctggtgaaagcgatgcccgcctggctgacccacggctttgaagtggctggcggtattctgcctgccgttggttttggcttgctgctgcgcgtaatgttcaaagcgcaatatatcccttacctgatcgccggtttcctgtttgtttgctacatccaggtcagcaacctgttgccggttgccgtactgggcgcaggctttgcggtgtatgagtttttcaatgcgaaatcccggcagcaagcgcaaccgcagcccgttgccagtaaaaatgaagaagaggactacagcaatgggatctgaaatcagtaaaaaagatatcacccgtctgggctttcgtagcagcctgctgcaagcgagctttaactacgaaaggatgcaggcgggcggttttacctgggcgatgttgccgatcctgaaaaagatttataaggacgacaaaccgggcttaagcgcggcgatgaaagataacctcgaatttattaatacccacccgaatctggtcggattcctgatggggttattaattagcatggaagaaaaaggagaaaaccgcgacaccattaaaggcctcaaagtggcactgtttggcccaatcgccgggattggcgatgcgattttctggtttactttgttgccgattatggcgggaatttgcagtagttttgccagccagggaaacctgctggggccgattctatttttcgccgtttacctgcttatctttttcctgcgcgtcggctggacccacgtcggttatagtgtcggcgtgaaggcgatcgataaagtgcgagagaacagccagatgattgcccgtagcgcaaccatcctcgggatcacggtaatcggcgggctgatcgctagctatgtgcatattaacgtggtgacaagctttgccatcgacaatacccacagcgttgcgctgcagcaggatttcttcgataaagtcttcccgaacattttaccgatggcctacaccctgctgatgtattacttcctgcgggtgaaaaaagcgcatccggtgctgttaatcggcgtgacttttgtgctctctattgtttgttccgcattcggcattttgtaaatggaacgaggcactgcgtctggtggtgcctctttacttaaggaatttcatcctgtgcaaacccttcagcaagttgaaaactatacggcgttaagtgaacgtgccagcgaatatttattggccgtgatccgtagcaaaccgaatgccgtgatttgcctggcgaccggagccacgccattactgacgtatcattatctggtagaaaaaatccaccagcagcaggttgatgtcagccagctcaccttcgtgaagctcgacgaatgggtggatctgccattaacgatgccaggcacctgcgaaactttcctgcaacagcatatcgtgcagccgctggggctacgtgaagaccagctcatcagctttcgctccgaagagataaatgagacagagtgcgaacgggtaacgaacctgattgcgcgcaaaggcggtctggatttatgcgttctcggattggggaaaaacggtcatcttgggctgaacgaaccgggagaaagcctgcaaccggcctgccatatcagtcaacttgatgccagaacacagcaacatgagatgttaaaaaccgcgggtcgccccgtgactcgtgggatcaccttaggcctgaaggatattctcaatgcccgcgaagttttgttactggtgactggcgaaggaaagcaggatgcgacagatcgttttctcacggctaaagtctctaccgctatcccggctagttttttatggctgcacagtaactttatttgtttaattaacacctaaccagatgaaaaatttgctcaaaatgtttaaattaacttatgtaacagtcacgcattatattaaataacatttgactgggttgaacataacgccgatagcaaaaggagttatgttcaacaatttaattttagatatacatataacttgttctattaataaatcacctcgtattctgactcgccccctggcgcagcaaagtcaggcatttatactcttttgaatacatagaaaattgatatcaatataatgaaaatatcaaatatttgcatataaatataatcttaaagttcagtctatttaatgttcaatgaaatatttctgcctgtataatctttaaagatgttgaacatatattcacattaaatatgattatgtacttgttacaaggataaggttatatatgaataaagttacaaaaacagctattgcgggcttacttgcgcttttcgcaggtaatgccgctgcaaccgatggtgaaatagtttttgatggcgagattttaaaatccgcttgtgaaatcaatgactctgataagaaaattgaagttgctcttggtcactataatgccgaacagtttcgtaatattggcgagcgtagcccaaaaattccattcactattcctttagttaactgcccaatgactgggtgggagcacgataacggcaacgttgaagcgtctttccgtctatggctggaaacgcgagataatggcaccgtccctaacttccctaatctggcaaaagtaggctcttttgctggcatagcggcaacaggtgtgggtatccgtattgacgatgcggaaagcggaaacattatgccactgaatgctatgggcaatgataacacggtttatcagatcccggcggaatccaatggtattgtcaatgttgacctcatcgcttactacgtaagtaccgtagttccaagtgaaatcaccccaggggaagcagacgctatcgttaacgtaacgctggattaccgttaatacgttagggcgttatctgacctgtcagataacgcccttttccttcctctttctcgttgtatcaggttgaaaaataactatgagtaaacgaacattcgcggtgatattaaccttgttgtgtagcttctgtattggccaggcgcttgcaggaggaatcgttttacagcgaacgcgagtgatctatgatgccagccgcaaagaggctgcgttacctgtcgcaaacaaaggcgcagaaacgccttatttactgcaaagttgggtagataatatagatggtaaaagccgtgccccatttattataaccccaccgctatttcgtcttgaggctggcgatgacagtagtctgcgaattattaaaacagctgataacctgcctgaaaataaagagagcctgttctacattaatgttcgtgccattccagcaaagaaaaaaagtgatgatgttaatgctaacgagttgacgctggtatttaaaacacggatcaaaatgttttatcgccccgcacacctgaagggacgggtaaacgatgcgtggaaaagtctggaatttaaacgtagtgaccatagtctcaatatatataacccaactgaatattacgtcgtatttgccggactggcagtcgataaaaccgatctcacaagcaaaattgaatatatcgcgcccggagaacataaacagttaccacttcctgcatctggcggaaagaacgtgaaatgggctgcgatcaatgattatggcggcagttccgggacagaaactcgtccactgcaataaaaaatataaaaacacaggtcatcagggaatgccacaacgacaccaccagggacataaacgcacaccgaaacagttggcgctcatcatcaaacgttgtttgccgatggtgctcactggcagcggcatgctttgcactaccgctaacgccgaagagtattatttcgaccccattatgctggaaaccacaaaaagtggtatgcaaacaaccgatctgagccgttttagtaaaaaatatgcacaactaccaggaacttatcaggttgatatctggctgaataaaaagaaggttagtcagaaaaaaattacatttaccgccaatgcagagcaacttctgcagccacagtttacggtagaacaactacgtgagctgggtattaaggtggatgaaatcccggcgctggctgaaaaagatgacgatagcgtgatcaacagccttgaacaaatcattcccggtacagctgctgaatttgatttcaatcatcagcaacttaatttgagcattccccaaattgcactgtaccgtgatgcaagaggttacgtctccccttctcgttgggacgatggtataccaacgctgtttaccaactacagctttacaggttctgataaccgttaccgccagggcaatcgtagccaacgacagtacctgaatatgcaaaatggtgctaattttggcccctggcgattacgcaactattccacatggacacgcaacgatcagacaagtagctggaataccatcagtagttatttacaacgtgatatcaaggcgttgaagtctcagttgcttctgggagaaagcgccaccagcggcagtattttttccagctacacctttactggcgtgcaactcgcttccgacgataatatgttgccaaacagccagcgcggatttgccccaacggtacgcggtatcgcaaacagtagtgcaatcgtgactatcaggcaaaatggttatgtgatctatcaaagcaacgtgagtgcgggtgcctttgaaattaacgatctctacccctcttccaacagcggcgatttagaagtcacgattgaagaaagtgacggtacacaacgtcgctttatccagccttattctagtttacccatgatgcagcgacctgggcatctaaagtatagcgcgaccgctggacgctatcgcgctgatgcaaacagtgatagcaaggaacccgaatttgctgaagccacggcaatatatggtttgaataatacttttacgctgtatggcggcctgctcggttctgaagattattatgcgctggggatcggtatcggcggcacacttggcgcactgggcgcgttgagcatggatatcaacagagctgacacccaattcgataaccagcactcttttcatggctatcaatggcgtacgcagtacatcaaagatatcccggaaaccaacaccaatatcgctgtcagctactatcgctataccaacgatggctattttagttttaatgaagccaatacccgcaattgggactataacagtcgccaaaaaagtgaaattcaattcaacatcagccagacaatatttgatggggtaagtctgtatgcctccggtagccagcaagactattggggcaataacgataaaaacaggaatatctctgttggggtttccggccagcaatggggagttggttacagcctgaattatcaatacagccgctacactgatcaaaataatgaccgcgcactctctttgaatctcagtattccgttagaacgctggttaccgcgtagccgggtttcctatcagatgaccagccagaaagatcgcccaacccaacatgaaatgcgtcttgatggcagtctgctggatgatggtcgcctgagctatagcctggaacaaagtctggatgacgataacaaccataacagtagcctgaacgccagttaccgtagtccttatggcaccttcagtgccggatacagctacggtaatgacagcagccaatacaattacggcgttaccggcggcgtggttatccatcctcatggcgtgacgctcagccaatatctgggcaacgcttttgcgcttatcgatgctaacggagcatctggcgtgaggatacaaaactatccggggattgctaccgatccttttggctatgcagtggttccttatctcacaacttatcaggaaaaccgtctcagcgtagatactacgcagctgcccgataacgtcgatcttgaacaaacaacacagtttgtggtgcccaacagaggtgcaatggtagcggcgcgtttcaacgccaatatcggttatcgcgtacttgttacagtcagcgatcgcaacggtaaaccgttgccctttggcgctcttgccagcaacgatgatacggggcaacaaagtatcgtcgatgagggcggcatactatatctctctgggataagcagtaaaagtcaaagctggactgtacgctggggaaatcaggcagatcaacaatgtcagtttgctttcagtacaccggatagtgaacctacaacctctgtattacaaggcacagcgcagtgccattaaggataaaaaaatgaaaagagcgcctcttataacaggtcttttgttgatatccacatcctgcgcttatgcctccagtggagggtgtggagccgacagcactagcggtgcgacaaattacagcagtgtggttgatgatgttacggtgaaccagacagataacgtgacaggacgggagtttacctctgcaacgctaagtagcactaactggcaatacgcctgttcctgctctgcgggtaaggcagttaaacttgtctatatggtcagccccgtacttaccaccactggacatcagacaggatattacaaactcaatgacagcctggatattaaaaccacattacaggcaaacgacattccaggactcacaaccgaccaggttgtctctgttaacacccgattcacacagataaaaaacaacacggtatattctgctgcaacccaaacgggtgtttgccagggtgatacgtctcgttatggacccgttaatattggtgcgaacaccacctttaccctgtatgtcaccaagccatttctcggcagcatgaccattccgaaaacggatattgccgtcattaaaggcgcgtgggtcgatggaatgggaagcccgtctacaggtgacttccatgatttagtcaagttaagcattcagggaaatctcaccgccccacagagctgcaaaattaatcagggcgatgttattaaggttaattttggattcatcaatggtcagaagtttaccacccgcaatgccatgccagacggttttactccagtagactttgatatcacttatgactgtggtgatactagtaagattaaaaacagcttgcaaatgcgcatcgacggtacaactggggtagtagaccagtacaacctggtcgccaggcgaagaagtagtgacaatgtgcccgatgtcggtattcgtattgaaaatctcggcggcggagttgcaaatattccttttcagaacggtatccttcccgttgatccttccgggcatggcaccgtcaatatgcgcgcctggccagttaatctggtcggtggtgagctggaaacaggaaaatttcagggcacagccaccattaccgtcatcgtgcggtaaaagaagacgttgcgttttgattaacgcaacgcttcggcactgttacccctgctgctccagcgcatacttatacagcgcatttttcttcacgccgtgaatttctgcggccagcgccgccgcttttttcagcggcagttctgcctgtagcagcgccagcgtgcgcagggcatcggcgggtaagtcttcttcctgtgctttatgaccttcgacaatcagcaccatttcgcctttgcgacggttttcatcttcctttacccacgccagcagctcgccaacgggcgcgccgtgaatggtttcccaggttttggtcagctcacgcgccagaaccacgtagcgggattcgcctaataccgcaacgatatcttccaggctatctaacagacggtgggtagattcataaaaaatcagcgtgcgcggctccgcttcaatggcttttagcgcatcacggcggcctttacttttggcaggtaaaaagccttcgtaacagaaacggtcagagggtaaacccgctgcgcttaacgcagtgatagcagcacacggcccgggtagcggcaccacgcggatccccgcttcacggcaggtacgcaccagatggtagccaggatcgttaattagcggcgttccggcatcggaaaccagcgcaatgttttgcccctcttgcagcttcgccagcagcgtttcagctttttgttgttcgttatggtcgtgcagcgcaaacaaccgggcattaatcccaaaatgttgcagcaataaaccggtgtgacgagtatcctcggcggcaatcagatcaacggcctgtaatacctctaacgcacgctgggtgatatccgccagattgccgattggcgtcggtacaatgtaaagctggccctgagaattatccgcgctttggtgttgtttcattgtgtcgtccgtattgccgatttaatattgagcattgcgtaaaaaaaatatcactggatacattatggtacccagtacattttctcgtttgaaagccgcgcgttgtctgcctgttgttctggcagccctgattttcgccggttgtggcacccatactcccgatcagtccactgcttatatgcagggcacggcgcaggctgattctgccttttatcttcagcagatgcagcaaagctctgatgataccaggatcaactggcaattactcgccattcgtgcactggtgaaagaaggtaaaaccgggcaggcggttgagttgtttaaccaactaccgcaagaactgaacgatgctcagcgtcgcgagaaaacactgctggcggtagagattaaactggcgcagaaagattttgctggcgcgcaaaacttgctggcgaaaatcacacctgccgatttagaacaaaaccagcaagcgcgttactggcaggcaaaaatcgatgccagccaggggcgtccttccattgatttactgcgcgcgttaattgctcaggaaccgctgcttggcgcgaaagaaaaacagcagaatattgatgccacctggcaggcgctctcctccatgactcaggaacaggcgaatacgctggtgatcaacgccgacgaaaatattctgcaaggctggctggatctgcagcgcgtctggtttgataaccgtaacgatcccgacatgatgaaagccgggatcgccgactggcagaaacgttatccgaacaatccgggcgcgaaaatgctgccaacgcagttggttaacgtaaaagcgtttaaaccagccagcaccaacaaaatcgccctgctgttgccactgaatggccaggcagcggtatttggtcgcactattcagcaaggctttgaagcggcgaaaaatatcggcactcagccagtggcagctcaggtagctgccgcacctgccgcagacgtagctgaacaacctcagccgcaaaccgtggatggcgttgccagcccggcacaagccagcgttagcgatctgaccggtgaacagcctgcagcccagccggtgcctgtaagcgccccggcgacaagcaccgcagcggtaagcgcacccgcaaatccatccgcagagctgaaaatctacgataccagtagtcaaccacttagccagatcttaagccaggttcagcaggatggcgcgagtattgtggtcggtccgttgctgaaaaataacgttgaagagttgctgaagagcaacactccgctgaacgtactggcactgaaccagccggagaatatcgaaaatcgcgtcaatatttgttacttcgcgcttagtccggaagacgaagcgcgcgatgcagcgcgtcatattcgtgaccagggtaaacaagcgccgctggtgctgatcccacgcagtagtttgggcgatcgcgtagccaatgcgtttgcgcaagagtggcagaaactgggcggcggcaccgttctgcaacaaaaatttggttccaccagcgaattacgcgcgggtgttaacggcggttctggtattgctttaacgggtagcccgattactctcagagcgacaaccgactccggcatgacgaccaacaatccaacgctgcaaaccacgccaaccgatgaccagttcaccaataatggcggtcgtgtcgatgcggtgtacattgtggcaacgccgggtgaaatcgcttttatcaaaccgatgatcgccatgcgtaacggtagccagagcggtgcaacgctgtacgccagctcccgcagtgcgcaagggaccgctggcccggatttccgactggagatggaaggcttgcagtacagcgaaatcccgatgctggcaggcggtaatctaccgttaatgcagcaggcactcagcgcggtgaataacgattatagtctggctcgcatgtatgcgatgggcgtcgatgcctggagcctggcaaatcatttcagtcaaatgcgccaggttcagggttttgaaatcaacggtaataccggaagcctgacggctaacccggattgcgtgattaacaggaacttaagttggctacagtaccaacaaggtcaggtagtccccgtcagttaaattaagtgattaacaggaacttatcatggctacagtaccaacaaggagtggtagtccccgtcagttaaccaccaaacagaccggcgatgcgtgggaagcacaagcgcgtcgctggctggaaggcaaaggactgcggtttatcgccgctaacgtgaacgagcgtggcggcgagatcgatctgataatgcgtgaaggccggaccaccatttttgtcgaggtacgctatcgccgctctgcgctttatggcggcgcggcagccagtgtgacccgcagcaaacaacacaaattattacagactgcccgcttgtggctcgcgcgtcataatgggagttttgatactgtggattgccggttcgatgtggtagccttcaccgggaatgaggttgagtggattaaggatgcctttaatgaccacagttaattaaggtttaaggattagcgtgcaagaaagaattaaagcttgcttcactgaaagcattcaaactcaaattgcggcggcagaggcgcttccggatgccatctcccgtgcagccatgacgctggttcagtctctgctcaatggcaacaaaatcctctgttgtggtaatggaacttccgctgccaatgcacagcattttgctgccagcatgatcaaccgtttcgaaacggagcggcccagcttacctgccattgcactaaatactgataatgttgtcttaacggcgattgccaacgatcgcttacatgatgaagtgtatgcaaaacaggtgcgggcgctgggtcatgcgggagatgtattgttagccatttccacccgtggcaacagccgcgatattgttaaagcagttgaagccgccgttacgcgtgatatgaccattgtggcattgaccggctatgacggcggcgaacttgcaggtttgttagggccacaggatgtggagatccgcattcctagccatcgtagtgctcgcattcaggaaatgcatatgctgacggtaaattgcctgtgcgatctgatcgataacacgcttttccctcaccaggatgattaaggagaatacatgaaggcattaagcccaatcgcagtccttatttccgcgctgctgttgcaaggttgtgttgccgctgccgtagtgggtaccgctgctgtgggtaccaaagccgcaactgacccacgcagtgtcggcacccaggtggacgatggtaccctggaagtgcgcgtgaacagcgcattgagcaaagacgaacagattaagaaagaagcgcgcattaatgtaacggcctatcagggcaaagtgctgctggttgggcagagtccaaatgctgaacttagcgctcgcgccaaacagattgctatgggcgtagacggtgccaacgaagtgtataacgagattcgtcagggccagccgattggtctgggcgaagcatctaacgatacgtggatcaccaccaaagtgcgtagccagctcttaaccagcgacctggtgaaaagctccaacgtgaaagtgaccaccgaaaacggtgaagtgttcctgatggggctggtgactgaacgtgaagcgaaagcggcggcagatattgccagccgggtgagcggcgtgaagcgggtaactacggcgtttacgtttattaaataacagccccttgtaatgcctgatgcgacgcttgccgcgtcttatcaggcctacaacgatacaaaccgtaggtcagataaggcgtttacgccgcatccgacatgttttccctcaaatcagaacaacagcgccagcccgccgacaatcacaccagacactgccaccatcgcccctgtcagccataaggctttcgccgggaacgctttgcgcagcataatcagactcggcaaactcactgccgggagcgtcatcaacaatgccagcgccggagcggttcccatacctgccagcatcatcgtttgtacaatcggaatttctgctgccgtgggaatgacaaacaagcatcctgctaccgccatcgccaccacccacatcaggctgttatcgacagcaccatcggcatgggggaataaccagacgcgagcggcacccaacaccagtactgcaaggatgtaaaccgggatcgtactccagaaaagcgtccatagcgccctgccccagcggctaaaaaacccgccctgtgcttccggtatgtcaatttcgaccggtgcctgcgtttgcggtgtttcacgcacccatttttgcaccagcgtcgcaatcagcaacaccatcaccagcccggccaccagacgaatcgccgcaaaaccccagccgaggacaaagcccataaacaccagcgtcgccgggtttaacaccggattgcccatccagaatgccagcgcaccgcccatgctcacctgttggcgacgcattcccgccgcgaccggagccgcacagcaggtacacatcatgcccggcaagctaaacagcgttcccagcagcgtgccgcgaaagcggctttgcccaagcgtacgcaacaaccagtcacgcgggatcagcacctgaatcaagctaccgaggatcacccccagcaccgccgctttccataccgcgaggaaatagatcatcgcgtaatccaacgccgcctgccatgggttagcatccgcctgcgcaaggatagatttaccgatactgtgggtttcggcagcagtaaacgctttgccgtagtaaggttcccatttcacataccagagaccggcaatgacaacgagaaagaaaagcgcgggtttccaccactgaatgggcgttgccgcctgagaactagactgaccagtcatagcattccccaggaataagttatgataattgagcgcgtgaatattacgctcactatcaattcttgggaataattattcagctcttttgcgtaattcactagagcttaaaatcgtcacgccttcatgctcaggccgcatgctctctgccagcatgacccgcgccacgtctctcgcatcaatggatttccagttacctggtaacaaacggaacagcggcgcaaaaagcgtttcgttcatccgctgtttgctacgatcgcccagtaacatgctcgggcgagcaatggtcaatttcggccagttctgggcgattaatgcttcttccatctcccctttgacgcggttatagaaaaacgggctgtgggcattggcacccatcgcactgactaccaacatatgctgcgcgcccagtcgccgcccggttaatgcggtatccactaccagcgtgtaatcggcatgaataaacgcctctttgctccccgcttctcgccgcgtggtgccgagacaacaaaacacaatgtcgatgggatcggtgacctgcgccaacgcgtcactcagttgcggatcatggggattaaacaccccgggcatatcgcccaacggacgtcgcgtcggcgcagcaatggcgttaactttcggttcgttaatcaacatccgcagcaggtgaccgcccaccagccccgttgcgcctgtaatcagtacctgactcatcttcgctcctttacagaattgtctgccttgcgctccacggctcatgcaccaggcttaatagaccatgaggtaattatccccgattgtgggaaattcgcctcatccaatgcaacaacgcggaggaagcatgagtaagaaaattgccgttttaatcactgatgaatttgaggatagtgaatttactagtcccgcagacgagttccgtaaagccggacacgaagtgattaccattgaaaaacaagcgggtaaaacggtgaaaggcaaaaaaggagaagccagcgtgaccatcgataaatccatcgatgaagtgacgcctgcggagtttgatgccctgctgctaccgggcggccatagtccggattatctgcgtggggacaaccgttttgtcacctttacccgtgattttgtgaatagtggcaaaccggtgtttgccatctgtcacggcccgcagttgctgatcagcgccgatgtgattcgggggcgcaaactgaccgcagttaaaccgatcattattgatgttaaaaatgcgggcgcggaattttacgatcaggaagtcgtggttgataaagatcagctggttaccagccggacaccggacgatctgccagcgtttaaccgcgaggcgttacgcctgctcggtgcctgattacgcctgctcggtgccactgtcgcgtagccaaatcatttttttaccaaagcccagcgtgttgtcggtgaatttgatttcatcgagccggatttcccacaccggggcgctcagcattctggcaaccggaaagcgacgattgtacgccttgcgcgcgaggtcgctttcctcaccttccagcctgcggatctcacctttaaactgcacaccgcgaattaacgctaccgttttcggctgaccgtttaccgttccggcaaccgcagcctgcggcccactcatctgcgcgtggcgcgttttttcttccgtcaaaatgtagaaggcgactttctgcgcatcaaaaagataaaaggcattagcgcaccagagttccccttcctgctgcacacaccaagtgacaacatgttgttttgccagccaacggctgatggcgatgagtgtttccattgctgttctcttttatactgtgggcctgaccttaacatgcgacgcagacgatgacaccctggtttctttacttgatccgtaccgccgacaataagctttataccgggatcaccacggatgtcgaacgccgctatcagcagcaccaaagcggcaaaggggcgaaagcactgcgcgggaaaggagaactaacgctggtgttttccgcgccagtgggcgatcgtagcctggcgttacgggcggaatatcgcgttaagcaactgaccaaacggcaaaaagagcgtctggtagcggaaggcgcagggtttgcagagctgttaagcagtctgcaaaccccggagattaaaagcgattgaaatgctcgtgatactcaaccaggccggtaacgccattcagcgcgtcatccgctaaacgatgtacctggaaggcgctttcagtgcccggccagcggcaacgcagatcgtgatgcgccgccagttcaaagccgaaacgactgtacagcgccggatcgcccagcgtcaccactgcggcatagccgaactcattaaggctatcgagtccttcatagaccagttggcgtgccagcccctgtccacggtatttttcatcaaccgccaacggtgccatgccgacccattgcaggtcttcgccctgcacatcaaccggactaaatgccacatagccaatgacctgaccttcgtcatctgtcgccaccagccccagcgtcagaaagccatcttcacgcagatcgtgaaccagcttcgcttccgcatcactttcgaaactgcgacgcagcagggcatcaatacccggcgcatcaatgggaatttctactcgaattagcatggttcacctacgcttgtctgtttggtttcaggcgcggttttcattcccgcctcaacaaaatccgccagttgcagcagcatcatgcgtaaggctttcggcatttgctccagttcaatggcgtccatcaggtttttcacatacagccccagctccgtatcgccttcaatcaccagccgacgctggaagaagagcgtatccggatcttgtttacgcgccgcaatcatcagcagatcgctggcgtcggcactaaaactcacatcagcttgcgcgttctggctaacgaccagtttgccattcaccacgctggtaaaccattgcaggtcaatatcacgcacatgaatacttaaccagcggccttcaagaaactccagctcgccatcatccagcgcctggcggaattgccagcttaagacctgctcaagaacctggcgttttagcgcaaatggcgtcagttttaccggtacactcaacagagatggccccaaatgcacaatacgggaacgcagtttatccaacacgagttttactccctgtttcaacaatcatcctattttgccatatcagaaaaataacatagcggtataaatcaacaattccatatgaaattgctgctaccaccaatacaactttaactgccttaaatcaaaaattgtcgcagcaaggttaactaaaatcccagttcgttaacatttttgcgttttgatagcgcaaccttcaggaaaaattatggagctgctctgccctgccggaaatctcccggcgcttaaggcggccatcgaaaacggcgcagatgctgtttatatcgggctaaaagatgataccaatgcccgtcacttcgccggccttaactttaccgagaaaaaattgcaggaagcggtgagttttgtccatcaacatcgccgcaaacttcacatcgcgattaacacttttgcgcatccggacggttacgcccgttggcagcgcgccgtggatatggcggcgcagctgggtgccgacgcgctgatcctcgccgacctcgccatgctggagtacgccgccgagcgttatccgcatattgagcgccacgtaagcgtgcaggctagcgcgaccaatgaagaggcgattaacttttatcatcgccattttgacgttgctcgcgtggtgctgccgcgcgtgttgagcattcatcaggtgaaacaactggcacgggtcacacctgtaccactggaagtctttgctttcggcagcctgtgcattatgagcgaaggtcgttgctatctgagcagctatctgacgggtgagagccccaacaccataggcgcgtgttctccggcccgtttcgtgcgctggcaacaaacgccgcaggggctggaatcccgcctgaacgaagtgctgatcgaccgttatcaggacggcgaaaacgcaggttatccgacgctatgtaaagggcgttatctggtggacggcgagcgctatcacgcgctggaagaaccaaccagtctcaataccctggaactgctgccggagttaatggcggcgaatattgctagcgtgaaaattgaaggccgccagcgtagcccggcgtatgtcagccaggtggcgaaagtctggcgtcaggctatcgaccgttgtaaggccgatccgcaaaactttgtaccgcaaagcgcgtggatggagacgctcgggagcatgtccgaaggcacgcaaaccactcttggcgcatatcaccgtaaatggcagtgagaaaagcaatgaaatattccttagggccagtgctgtggtactggccaaaagagacgctggaagaattttatcagcaggccgccaccagcagcgccgacgtgatttatcttggtgaagcggtatgcagcaagcgtcgggcaaccaaagttggcgactggctggagatggcaaaaagcctcgccgggagtggtaagcagattgtgctctccacgctggcgctggtgcaggcaagttctgaactgggcgaactgaaacgctatgttgagaacggtgagtttctgattgaagccagcgatctcggcgtggtgaatatgtgcgctgaacgcaaactgccgttcgtcgccgggcacgcgctgaactgctacaacgcggtgacactgaaaatattgctcaaacagggcatgatgcgctggtgtatgccagtggagctttcccgcgactggctggtgaatctgcttaatcagtgcgatgagctgggcattcgtaaccagtttgaagtggaagtcctgagctacggtcatctgccgctggcctactccgcccgctgctttaccgcgcgtagcgaagaccgcccgaaagatgagtgtgaaacctgctgcattaagtatccgaacgggcgcaacgtgctgagccaggaaaaccaacaagtgtttgtactcaatggcattcagaccatgagcggctacgtttacaacctcggtaacgagctggcatccatgcagggcctggttgatgtggtccgcctgagtccgcagggtactgacactttcgcgatgctcgacgccttccgcgctaatgaaaatggcgctgcaccactgccgttgacggcgaacagcgactgtaacggctactggcggcggctggcaggactggagctgcaagcctaagtaaatagctcactttgttaacaactttaactactctttaatgcagtattaaagattaatcggtaacaaagtgagctgttatgactgataaaaccattgcgtttagcctactcgatctggcccccattcccgaaggttctagtgcgcgagaagcattctcccactctctcgatctcgcccgtctggctgaaaagcgcggctatcatcgctactggctggcagaacaccacaatatgactggcattgccagtgctgccacgagcgtattgatcggctatctggcggcgaataccaccacgctgcatctggggtctggcggcgtgatgttgcctaaccacagtccgttggtcattgcagaacagttcggcacgcttaatacactctatccggggcgaatcgatttggggctgggtcgtgctccgggtagtgaccaacggacaatgatggcgctacgtcgtcatatgagcggcgatattgataatttcccccgcgatgtggcggagctggtggactggtttgacgcccgcgatcccaatccgcatgtgcgcccggtaccaggctatggcgagaaaatccccgtgtggttgttaggctccagcctttacagcgcgcaactggcggcgcagcttggtctgccgtttgcgtttgccagtcacttcgcgccggatatgctgttccaggcgctgcatctttatcgcagcaacttcaaaccgagtgcacggctggaaaaaccatacgcgatggtgtgcatcaatattatcgccgccgacagcaaccgcgacgctgaatttctgtttaccagtatgcagcaagcctttgtgaagctgcgccgtggcgaaaccgggcaactgccgccgccgattcaaaatatggatcagttctggagtccgtctgagcagtatggcgtgcagcaggcgctgagtatgagcttggtaggtgataaagcgaaagtgcgtcatggcttgcagagcatcctgcgcgaaaccgacgccgatgagattatggtcaacgggcagattttcgaccaccaggcgcggctgcatagctttgagctggcgatggatgttaaggaagagttgttgggataatgtgtcttaacgcgggaagccttatccgagctggcaacgctgtcctacatagacctgataagcgaagcgcatcaggcattgtgtaggcagcagaaatgtcggataaggcaccgctgattactgatacaccggcagtaaattaaagctgcttaaaatatgcaccagtgcgttgccgacgccaaacaccagaatcagcgcaatcatcggcttgccaccccagacgcggaatttcgggctgccaaagcgtttacggcttgcacgggctaacagcgccggaacaattgccgcccagatggtagccgctaaaccagcataaccaatggcgtacaggaatccgttcgggaacaacagcccccccacaactggcggggcaaaggtcagcaatgccgttttcaagcggcccacagcgctgtcgtcgaaaccaaacagatctgccagatagtcaaacaaacccagcgttacgccgaggaagctactcgctaccgcaaagttactgaacacgaccagcagcagatccagactacggctgttcagtacgccgcttaacgcctgtaccagcacatcaatattaccgcccttctctgcaataccgataaactccggacgcgggatgttacccatcgtcgccagcaaccagatggtatacagcgccagcgccatcagcgtaccgtacaccagatatttcacgatggttttcggatctttgccgtaatacttcatcaggcttggcacgttaccgtgataaccaaagcttgccagacagaacggcagggtcatcaacagatacggtgcataagacgcattgctttcggcgacgttgaacaatgtcgcaggctgcacatgccccagcaggctaccaaaggtgaggaagaaggtaatgactttcgcccccagcacaatcgctgtcatgcgactgacggctttagtgctcaaccacaccacaaacgctaccagcaatgcaaaaccaaaacccgccgcccgtgccgggacgtttagactcatctctgcgaaggtgtgatgcagaatgctaccactggcagaaatataggcataggtcaggatatagagcacaaaggcaatggaaatgccgttgaccacgttccagcctttgcccagcaaatctttggtgatggtgtcaaaactgctaccgattctgtaattcaggttagcttccagaatcatcaagccggaatgcagcatacagaaccaggtaaagatcagcgccgccatactccagaaaaaccacgccccggacatgaccactggcagagaaaacatccctgcgccaataatggtgccgccgataatcaccacgccgccaagcaggctcggactcgtttgggtggtggttagtgttgccatgagggcttctctccagtgaaaaatagtgcgactgcgttgttatgcattgcactgtaccagtacacgagtacaaaagacagaaaaaaagccccgatggtaaaaatcggggctgtatatattattttacagattgtgttcgctgttcagcgatgattacgcatcaccaccgaaacgacgacgaccggtagaatcatcacgacgcggagcgcggccttcacgacgttcgccgctaaaacgacgaccatcaccacggccaccttcacggcgttcaccgctgaagttacgaccgccttcacgacgttcgccaccgaaaccacgaccaccgccacgacgctcaccgccagtatgcggctgtgcatcgcccagtaactgcatgttcatcggcttgttgagaatgcgagtgcgcgtaaagtgttgcagcacttcacccggcatacctttcggcagttcgatggtggagtgagaagcaaacagcttgatgttaccaatgtaacggctgctgatgtcgccttcgttagcaatcgcaccaacgatatgacgaacttcaacaccatcatcgcggcccacttcaatgcggtacagctgcatatcgccaacatcacgacgttcacgacgcggacgatcttcacggtcaccacgcgggccacggtcgttacgatcgcgcggaccacggtcatcacggtcacggaattcacgtttcggacgcatcggcgcatctggcggtacgatcagagtacgttcaccctgtgccattttcagcagtgccgcagccagagtttcgagatccagctcttcaccttcagcagtcggctgaattttgctcagcagtgcgcggtattgatccagatcgctgctttccagctgctgctgtactttagcggcgaatttttccagacggcgtttgcctagcagttctgcgttcggcagttctacttccggaatagtcagcttcatagtacgttcaatgttgcgcagcagacgacgctcgcggttctcaacgaacagcagcgcgcggccagcacgacccgcacgaccggtacgaccgatacggtgaacgtaagactcagaatccatcgggatatcgtagttaactaccaggctgatacgctcaacgtccaggccacgggctgcaacgtcggtcgcaatcaggatgtccagacgaccatctttcaggcgttccagtgtctgttcacgcagcgcctggttcatgtcaccgttcagcgcggcgctgttgtagccgttacgctcaagagcttcagccacttccagagtcgcgtttttggtacgaacgaagataatcgccgcatcaaaatcttccgcttccaggaaacgtaccagtgcttcgtttttgcgcataccccagacagtccagtagctctggctgatgtcaggacgggtagtcacgctggactgaatgcgcacttcctgcggctctttcataaagcggcgggtaatgcgacgaatcgcttccggcatggttgcagagaacagagcggtctgatgaccttccgggatctgcgccataatggtttcaacgtcttcgatgaagcccatgcgcagcatttcgtcagcttcatccagaaccagaccgctcagtttagagaggtccagagtgccacgtttcaggtggtccagcagacggcccggagtaccgacaacgatctgcggcccctgacgcagggcgcgtaattgcacgtcataacgctggccgccgtacagagcaaccacatttacgccgcgcatgtgtttagagaaatccgtcattgcttcagcaacctgtaccgccagttcgcgggtcggtgccagcaccagaatctgtggtgctttcagctcaggatcaagattctgcaacagaggtaaagagaatgctgcagtttttccgctccccgtctgggccatacccagaacgtcgcggccattcagcagatgtggaatacactctgcctgaattggagatggtttttcgtaacccagatcgttaagggcttcaaggataggagccttcaggcccagatctgcaaaagtggtttcgaattcagccatgtagtacgtgtgcctcaaaattaatggcggccagtctacataactcatcatgaaattgatcagcaattttcattgaaaagtgtgaaccggctcaaagtaggtgtattaacgaacaacaacgccctcacccgttaaggtgatggcaatcaaaaaagattacgggctgatgtgtacgtcagttattgctggtcgctttctgccaggtcatcttggtcctggcccaggaggcttaattccaacaatgcgtatcggtgctcaacaaagttatgaacgttgttggcaaccgccagtttgaacagtgccgtggcgctgtccaaatcccccagacttaggtagtacttacctaaatagaagttggtttcactgagatgctcagcgaggctggtgttatccgttgcgtccgccttgagcctttccattaacgtttgttcgctaatgttgcccaggtagaactcgacaatgttccatccccactgttccttatcgcttttttcgaagtgctgtttcaacacttctttagcctgcttctcatcgagcttctgctcggcgagataaagccacagactacggaaaggatcattgggatcgtcttgataaaacgccagcagatcatcttgcgctaacttgtcacgaccgccgtaatataatgcgatcccgcgattcaagtgcgcgtagttgtaagttggatcaagctcaagtacagaatcaaacgcttcataggcagcatcaaaattgcctgcctgcgttaaatatatgcctaagtaattgaatacttcaggcatatccggtcggattgccagcgcttggctaaaatcgttacgcgctaatgccctcagaccgagactatcatacaacactccgcgctcatataaaagctgtgcgcgttcgtcatcggttaaagcccgactggcaaggatttgttccatacgtgccagaatcacttcctgctgtaaagtcggttgcaatggtaccgcgaggacttcacttttacgccaggaagtattactgcatcctgcaagcgtaagtgctgtcgcaacgaaacaccagcgcaaaaaaggcttcatttcccactcccgaagaccacggttgaatgaacgtcctgttcccggttgctaacaaggcgtcctgcccggttaaaagccccccgccgcagcggagggcaaatggcaaccttactcgccctgttcagcagccggagcttccggtgctgcagcaggttgagactgctcagtcgcttctttaatgctcagacggatacggccctggcgatcaacttccagaactttcaccggtacttcctgacccatctgcaggtaatcggtcactttctcaacgcgtttgtcagcgatttgagagatgtggaccagaccttctttaccgccgccgatggcaacaaatgcgccaaagtcaacgatacgggtcactttaccagtgtagacgcggcccacttcgatttctgcagtgatctcttcgatacgacgaatagcatgtttcgctttctcgccgtcggtcgctgcaatcttcacagtaccgtcatcttcgatttcgatggtggtgccagtttcttcggtcagagcacggattacagaaccgcctttaccgataacatctttgatcttgtccgggttgatcttgatggtatggatacgcggtgcgaactcagagatatcgccacgcggcgcgttgatcgcctgttccattacgcccaggatatgcagacgcgcacctttagcctggttcagcgcaacctgcatgatctctttggtgataccttcaattttgatatccatctgcagtgcagagataccgtcgcgggaacctgcaactttgaagtccatatcgcccaggtgatcttcgtcgcccaaaatgtcagacagtacaacgtagttgtcgccttctttcaccagacccattgcgatacccgcaacggcagctttgatcggcacacctgcgtccatcagcgccagagacgcgccgcacacggaagccatagaagaggaaccgttggattcagtgatttcagacacaacacgtacggtgtacgggaatttgtccatatccggcatgactgccagcacgccgcgcttcgccagacgaccgtgaccaatttcacgacgcttcggagaaccgaccatgccggtttcgcctacggagtacggagggaagttgtagtggaacaggaaggtatcggtacgttcgcccatcagttcatcaagaacctgcgcgtcacgagcagtacccagcgttgcggtaaccagcgcctgcgtttcaccacgggtgaacagcgcagaaccgtgagtacgcggcagcacgccagtacgcacatccagaccacggatcatatctttttcacgaccgtcgatacgcggttcgcctgccagtacgcggctacgaacaacgtttttctcgatcgcgtgcagaatttcacccagttcgttttcgtccagggtttcgtcttcagcaagcagcgtcgcgatggtttcagatttgatgacatcaacctgcgcataacgctcttgtttgtcggtgatgcggtaagcatcgctcaggcgagcttcagccagtgcagcaacgcgcgcgtttagcgcttcgtttaccggctccggctgccagtcccaacgcggtttaccggcttctttcaccagttcattgatgttctgaataacaacctgctgttgttcatgaccgaacactactgcgcccagcatctggtcttcgctcagcagttgagcttcagattcaaccatcagtacagcggcttcagtaccggcaacaaccagatccagtttgctctctttcagctcgtcctgagtcgggttcagtacgtactggtcattgatgtaacctacgcgggcagcaccaatcgggccattgaacggaataccagacagagacagcgctgcggaagcaccaatcatcgcgacgatatccgggttaacttgcgggttaacagaaaccacggtggcgataacctgaacttcgttgacgaagccttccgggaacagcgggcgaatcgggcggtcaatcagacgcgcgatcagggtttcgccttcgcttgggcggccttcacgacggaagaagctacccgggatacgaccagcagcgtaggtacgctcctgatagttaacggtcagtgggaagaagtcctgacctggtttggcttttttctggccaacaacggtaacgaataccgcggtgtcatccatgctaaccataacagcggcagtagcctgacgagccatcatgccggtttccagagtcacggtgtgttggccgtactggaatttacgaacgatcggattaagcaatgtaatatcctttctctttcttagacagtaccttacggcactggtgttaataccgcttcttctgcgcatcctcgcgactaatgacaaccctaacccagctctatgtgggtaaagcctctcattagccgcgcgaacctctgcaacggaagatcattcatagcaacaatacattagtttccagtgaattgctgccgtcagcttgaaaaaaggggccactcaggcccccttttctgaaactcgcaagaattagcgacgcagacccaggcgctcgatgagctgggtgtaacgtgctacgtctttacgtttcaggtagtcgagcagtttacgacgctgagaaaccatgcgcagcagaccacgacggctgtggtgatcttttttgtgctctgcaaagtggccctgcaggtggttgatctgtgcagtcagcagtgctacctgaacttcggtagaaccggtgtcgtttgcgtcacgaccaaactcagaaacgattttagctgttgcttcagtacttagagacattttaaaactccaaagtatatagaatgaaaggacgccgatctctaattcagcgatcccagtgtacgttacgcaaagtgttaaacaatttacgcgacgttaagcggcagtattctactcgtagcgacctgttatcgcaagacggttaacattacgccgggtattcaaccaccaggcgacgaggcgcaacgcggccttcatcgtcaatttcgcccataccgataaatttgccgttctcaccttccgtgacgcgaaccagtccttccagtggcgcaccagatgtacgaaccgggttaccatttttgaagtaaacagaagacgttaacggaagattcaccaccggatagtcgctagctggactgtccattggcatcagtaatggatcaagtaactccgcggctggaatatcctgctgttcagcttgctcaacaagttcacgcaggtgctccagggtcaccatccgttcaaccggatatttacttaccgccagacggcgcaggtaaataacatgcgcgccacagccgagtttttcacccaggtcatcaatgatggtgcggatataagtgcctttactgcagtgaatttccagctccagctcattgccttcatggcgaataaacagcaattcataaacggtaatcggacgcgcttcacgcggaacttcaatgccctgacgcgcatattcgtacagttttttgccctgatatttcagtgcactatacatgctagggatctgttcgatatcgccacggaaagtatccagtgccgctgccagctgctctgcgctaaaggttaccggacgttcttcaacgatctgtccgtcggcatcagaagtatcggtacgctgtccaagacgcgcaatgacccgatagcgtttgtcggagtccagcagatactgggaaaacttcgtcgcttccccgaggcaaatcggcaacatgccggtcgccagcgggtccagcgcaccggtatgcccggcacggttggcgttatatatacgtttcactttttgcagcgcatcgttgctggacataccctgaggtttatccagcaacaaaacgccgttaatgtcgcgaccgcgacgacgaggacgactcattagtcctccttgctgtcgtccgggttaacacgacgttcttcgtcatgtttgaccacgctggtcaccaggttactcatgcgcatcccttcaaccagagagttgtcgtagaagaaggtcagttccggcacgatacgcaggcgcatcgctttccccagcaggctgcggatgaaaccagaagcttcttgcaacgctttgatgcccgctttaaccgcgtcttcatctttgtcgttgaggaacgtcacatatactttggcatacgccaggtcgcgagacatttcgacaccggaaacggtggtcatcatgcccaggcgaggatctttaatttcacgctgcaggatgagagcgatctctttttgcatttcctgcgctacgcgctgcgggcgaccaaattctttcgccataataaattctcctgacaaaaaaggggctgttagcccctttttaaaattaatttcaggtggaagggctgttcacgttgacctgataagacgcgccagcgtcacatcaggcaatccatgccggatgcagcgtaaacgccttatcccgcatggaaccctaaaaaccttaagcaatggtacgttggatctcgatgatttcgaatacttcgatcacatcgccagtgcggacgtcgttgtagttcttaacgccgataccacattccataccgttacggacttcgttaacgtcatctttgaagcggcgcagggactccagctcgccttcgtagataaccacgttgtcacgcagaacgcggatcgggttgtgacgtttaaccacaccttcggtaaccatacagcctgcgatggcaccaaatttcgggcttttgaacacgtcacgaacttccgccagaccgataatctgctgtttcagttccggagacagcataccgctcatcgccgctttcacttcgtcaatcaggttatagatgacggagtagtaacgcagatccaggctttccgcttcaatcactttacgtgcagaggcatcagcacgtacgttaaagccaaccaggatggcgttggacgccgcagccagggtggcgtcggtttcggtgataccacctacgccagaaccgatgatcttcactttaacttcgtcagtagacagtttcagcaaggagtcggagatcgcttcgacagaaccctgtacgtctgccttcaggacgatattcacttcgtgaacttcgccttcggtcatgttggcgaacatgttctcgagtttagatttctgctgacgcgccagtttaacttcgcggaatttaccctgacgatagagtgcaacttcacgcgctttcttctcgtcacgtacaacggtaacttcatcacccgcagccggtacgccggacaggccgaggatttccaccggaatggacggacccgcttccagcacttcctgacccagttcgttacgcatcgcacgaacacgaccgtattcgaagccacacagaacgatatcgcccttgtgcagagtaccttcacgtaccagaacggtagcaaccggaccacgacctttatcgaggaaggattcgataaccgcaccgctcgccatacctttacgtaccgctttcagctccagaacttccgcctgcagcaggatagcgtccagcagttcatcgataccggtacccgctttcgcagatacgtgtacgaactggctttcaccgccccactcttccggcaggatgccgtactgggagagttcgttcttaacgcgatccggatcagcttctggtttatcgatcttgttcactgcaaccaccaccggtacctgcgccgctttcgcgtgctggattgcttcgatggtctgcggcatcacaccgtcgtcggcagcaacaaccaggactacgatgtccgttgcctgcgcaccacgagcacgcatactagtaaacgcggcgtgccccggggtgtccaggaaggtgatcatgccgttttcagtttcaacgtggtatgcaccaatgtgctgggtaatgccgcccgcttcgccagaggccactttcgtactacgaatgtagtccagcagagaggttttaccgtggtcaacgtgacccatgatggtcacaaccggcgcgcgcggttcagccgcagcacccgtgtcacggtcgctcattaccgcctcttccagctcgttttcacgacgcaggataactttatggcccatctcttcagcaaccagctgtgcggtttcctgatcgataacctggttgatggttgccattgcgcccagtttcatcatcgctttgatgacctgagagcctttaaccgccatcttgttcgccagttcgccaacggtgatagtttcgccgatcacaacgtcacggttaacggcctgagcaggcttctggaagccttgctgcaggctagaacctttacgttttccgcctttaccgccacgtactgctgcgcgtgcttcttcacgatcagctttactttcagcgtgtttgttgcctttcttcggacgcgctgctttcgcgttacgaccacggccacggccgccttcgacttcacgatcgctttcgtcttctgcctggcgagcatgttgagaagtagtgacgtgataatcgctggaatcttcagtcggttccgcgttatcagtccatttgttttcttccgccatacgacgtgcttcttcagcaacgcgacgtgcttcttcttcgagtttacgacgcgcttcttcttcagctttacgcttgagctctgcagcttcctgctcacggcgggctttttcagcctgggcgtttttagtcatatcgtcttgttgattgctcactttgtctttttccgcagcttcacgtttcgcttgttcagcagcttcacgcttagcttgttctgcggcctcacgttcagctttttgttgcgcctcgcgtttagcgctttcttctgcctcacgacgggcttgctcttccgcttcacgctgcgcttgctcttccgctgcaaggcgttcagcctcttgcggatcgcgtttcacaaaggtgcgtttcttgcggacttcgatttgtacgcttttgctttttccaccggtaccaggaatgttaagggtgctgcgtgttttacgttgcagcgtcaatttgtccgggccactatttttctgattcaggtggtcaatcaaagtctgtttctcttgtgcagacacagagtcgtcagcagacttccggatacctgcatcagcaaattgctgtaccaggcgttccacggaggtctgtcgctctgcggccagcgttttaatcgttacatctgtcatgctgttccttcctgctacagtttattacgcttcgtcaccgaaccagcaaatattacgggcagccataatcagtgctccggctttttcgtcggtcaacccttcgatatcagccagatcatcaatgccctgttcggcgagatcttccagcgtacaaacgccacgggcggccagtttgaatgccaaatcacgatctaccccttcaaggttcagcagatcgtcagccggtttgttatcaccgaggctttcttcctgggcctgtgcaatggtggccagtgcatttttagcacgctcgcgcagtgcttcaacggtcggctcatcaaggccttcgatttccaacagctctttcatcggcacataggccaattcttccagcgtgctgaagccttcttctaccagaacagtcgcgaagtcttcgtcgatgtcgagatatttggtgaaggtgtcgatcgctgcgtgcgcttccgcctgatgcttagcctgcaggtcgtcaacggtcatcacgttgagttcccaaccgctcagctggctagccagacgcacgttctgaccgttacggccaatcgcctgcgccaggttaccggcttcaacggcgatatccatggtgtgtttatcttcatccaccacgatagaagcaacgtctgccggtgccattgcgttaatcacgaactgcgccgggttatcatcccacaggacgatatcgatacgctcgccacccagttcagtagacaccgcctgaacacgcgcgccacgcatacctacgcaagcacctaccggatcgatacgtttatcgttggttttcaccgcgattttcgcacgagaacccggatcgcgagccgctgctttaatttcaatcacttcttcgccgatttctggcacttcaatacggaacagttcgatcagcatttccggcttggaacgagtgacgaacagttgcgcgccacgcgcttccgggcgaacggaatagagcacgccacgaacgcggtcgccagggcggaagttttcacgcggcagcatatcttcgcgcaggatcacggcttcagcgttgttgcccagatccagagagatgttgtcgcggtttacttttttcaccacgccggtgatgatttcaccttcgtgttcacggaactgatcaaccaccatcgcacgttcggcttcacgcactttctgcacgataacctgttttgccgtctgggtagtgatacggtcaaaggtaacagactcaatctgatcttcaacgtaatcgcccaggttcaggctttcatcttcataacgtgcggcttcaagggtgatttccttggtcggctgggtgacttcatcaacaactaaccagcgacggaaagtgtcaaaatcaccgcttttgcgatcgatctgtacgcggacgtcgatctcttgttcatattttttctttgttgctgtcgccagcgcgctttccaatgcttcgaaaatcttctcgcgaggtagcgccttttcattggatacggcttcaactacagccaaaatttctttgttcatcgcgggcttttcacctcatccagactattaaaagtggggaaccaggttcgccttctggatattactcagcgcgaacacttcatctttaccttcgacggtaactgtgatcatttcaccgtctaccgctttgataacgccctgccatttacgacggttttgtaccgccatacggagaaccagagtcacctcttctccgacaaaacgggcgtagtgttcagccgtgaacagtgggcgatcgagacccggactggagacttccaggttataagcaacggtgatgggatcttcaacatccagcacagcacttacctggtggctcacatcagcacaatcatcaacattgatgccatcttcactatcaatatagatgcgcagtgtggatgtgcgaccgcgaataaattcgatgccaaccagttcaaaacccagggcctcaactggcgcagtaatcatctctgttaatttttgctctaatgtggacaagcccacccccaagacataaaaaaagggcctaaagcccagttattctgtagtcagataacaaaaaaccccgataaatcggggctttatataactgaaccctataaccgcaactgcggtctggagcactttccagaaggattttttcaaatcccactacgaaggccgaagtcttcacagtatatttgaaaaaggactctaagggaaagtggttgcgggggccggatttgaaccgacgatcttcgggttatgagcccgacgagctaccaggctgctccaccccgcgcctgaaacgtggcaaattctactcgttttgggtaaaaaatgcaaatactgctgggatttggtgtaccgagacgggacgtaaaatctgcaggcattatagtgatccacgccacattttgtcaacgtttattgctaatcatgtgaatgaatatccagttcactttcatttgttgaatacttttgccttctcctgctctcccttaagcgcattattttacaaaaaacacactaaactcttcctgtctccgataaaagatgattaaatgaaaactcatttattttgcataaaaattcagtgagagcggaaatccaggctcatcatcagttaattaagcagggtgttattttatgacgacgattctcaagcatctcccggtaggtcaacgtattggtatcgctttttctggcggtctggacaccagtgccgcactgctgtggatgcgacaaaagggagcggttccttatgcatatactgcaaacctgggccagccagacgaagaggattatgatgcgatccctcgtcgtgccatggaatacggcgcggagaacgcacgtctgatcgactgccgcaaacaactggtggccgaaggtattgccgctattcagtgtggcgcatttcataacaccaccggcggcctgacctatttcaacacgacgccgctgggccgcgccgtgactggtaccatgctggttgctgcgatgaaagaagatggcgtgaatatctggggtgacggtagcacctacaaaggaaacgatatcgaacgtttctatcgttatggtctgctgaccaatgctgaactgcagatttacaaaccgtggcttgatactgactttattgatgaactgggcggccgtcatgagatgtctgaatttatgattgcctgcggtttcgactacaaaatgtctgtcgaaaaagcctactccacagactccaacatgcttggtgcaacgcatgaagcgaaggatctggaatacctcaactccagcgtcaaaatcgtcaacccgattatgggcgtgaaattctgggatgagagcgtgaagatcccggcagaagaagtcacagtacgctttgaacaaggtcatccggtggcgctgaacggtaaaacctttagcgacgacgtagaaatgatgctggaagctaaccgcatcggcggtcgtcacggcctgggcatgagcgaccagattgaaaaccgtatcatcgaagcgaaaagccgtggtatttacgaagctccggggatggcactgctgcacattgcgtatgaacgcctgttgaccggtattcacaacgaagacaccattgagcagtatcacgcgcatggtcgtcagttgggccgtctgctgtaccaggggcgttggtttgactcccaggcgctgatgctgcgtgactctctgcaacgctgggttgccagccagatcactggtgaagttaccctggagctgcgccgtgggaacgattatagtatcctgaataccgtcagtgagaacctgacctacaagccagagcgtctgacgatggaaaaaggcgacagcgtgttcagcccagatgatcgtattggtcaattgaccatgcgtaacctggatatcactgatacccgcgagaaacttttcggttatgccaaaactggcctgctttcctcctctgccgctagtggcgtgccgcaggtggagaatctggaaaacaaaggccagtaattcgacatcaaccctgcccttcaggggtggggttaccttgcttatcctctgtaaactcctttctgagcatcacataatcgaaaacatcatggtttgcatccacaacccgactgtctcctttatagtgtgcaatcacttcctcaagcgtttgcggctgttccggctttgttacccccatccacgcattaataaggtaattattgtaagctgtgctaaagatgttgttttccgttgtgcgatccacgccatccccaagaacggggctataccagataaacatcgggacatgatatgcctgctggctagcctccctgcctccatgaaaatagacgttcttcttcgtagggtcacgttccaggccgtggtcggcaaaatacatgacgctggcgcggcgatcttttaataattcaaaaacctgacctagcaaactatctgtgtaatgaatggagttgtcatagcaggcatcctgatcgtcctgcggttgaaacacggcgctggattgcggataggcgctacaagccggttcatggcttccatttaaatgaagaacaatcagtttcttttgctgcgtattttgctgtaatgcttggcttaaatgcggcaacaacaattcatcaaatcctctgacataaactgtttccatggcgcgcatggcgatactggtaactgctgtaccattctgccgaaaagcggattggctgcttagccagaaagtctgaaatcctgcttgattagccatattaataatgttgtcggggtaattatgaatgtcatgactcaaaacagaatcagcagttaaagaaaggggaacgctcagcgcagtgtaaggtgcgccgcttattgcttgattaaacagtttgatctgttttctttgtgcttcaacttgcggtgtcgtagagcgtgtatatccatacaaagacatattgtcgacacgtacagactcccccacaatcaacacgtaggtatcaatacctgtatccctgacacttaattgaaaatacggcaccgtgtttgcaatactgagtaatctttgatgctctttcgctgctaaagcaaaatagttgagattgaaaaacggcgtataggtagcaaatcggctcgctagtatatatggactgaacgcttttttattttttgcatctttataagcaaattgacaagcggaaaataaactgccgctaatgacaatcagcaataatattcctgtcactttttttgtcggcaaggaaacatcatattttattattactgccaaaaaaagaagggataaaaaagcaaaggcacatagataagggatatacatccccagcattttgacaacttcatccggatcactctggagcacactaatcgcaaatccatcattgaaagttgtaccaaaggtacaccaactatagaggctaatactcatgtctgccgcagtcagtaacacaaatggtgcggcaacaagcaggcgaagcggaagggaacttatacgttttacaaccaggatggtcagaacgaagaacagcaagcgctgaaccatatgcgctccggaagaagcgactaagttcgtaataccaaaaacaataacacaaagatacaacaaccaatgagatttaaaagttctagcaaatttgttgaatactgtcatccagaaatccaagttcacaaccaatataaacaattatcaacaatgtttaattttatatcagacatgtttttcaactctgatccatatcagaacgaaacactgttagttttttctttttaaatgatgcggccattgcgttctcagtaattaaataacattatcaatgcgtctctaaacattacgcagaacgtagccatcagtcgttatactgacaggagcaggatggtttatcgagaagtaaacatatccgtattcgtaccggaactggagttgacacaataaagtgccaattatgtcagtagaagggaaaaatttataactaaggcgtaccggcaccatcgtttcaaggtaccagctacgagtaaagcaactggacgagatacagatacctgacaaccattcctcagaccaggaccaaaacgaaaaaagacgcttttcagcgtctcttttctggaatttggtaccgaggacgggacttgaacccgtaagccctattgggcactaccacctcaaggtagcgtgtctaccaattccaccacctcggcacggatactactttttagttcgggatatcgctggtcggcttagccggagcagctggctgagtttgttcggttttcgccggtgcactcagattttcccattcgctacctttattggttttgttgctattgatgttacccagcaccagactgatgatgaagaataacgttgccagcagcgccgtcatgcgggtcatgaagttaccagaaccactactaccaaacagcgtagcggaagcgcctgctccgaaggaggctcccatatcagcgcctttaccttgctgcagcatgatcagaccaacaaggccaattgccacaataaggaaaactactaaaagagcttcatacataatcaacctgttccttgcggagttgccgcgtaccaatgcttcaaccaataaagcgggagtttttaatctttcccactgaagcgggtgtgaatactaaccaaagcgaatgaccttcgcaagggcaattttatcgcattgtatcaactgcggaaaaaaacagcaaaaccgatgtgttcgctgagaaaaaaggcgacaatcgccgcctttttagccagttatctaacgctttaaacggcttttactgcatcggcgatgcggtgtgcaaattcagtcacctgcgcttcgtcttcgccttccaccatcacgcgaattaacggttcggtgccggatttacgcagcaacacgcgtccacggttgcccagcgcagcttcaacctctgcggtcacggctttaacactctcatgctcaagtggatcgccgctacctgcggtgtaacgtacgttaaccagaatctgcgggaacattttcatgccgctgcaaaggtcgtgcaggctcatatggttacgtgccatcgccgccagcacctgcaagccagcaacgatgccgtcaccggtagtagttttatccagcaggatcacatgaccggaattctctgcaccgatacgccagcctttctcctgcattttttccagtacgtagcggtcacccactttcgcgcgcgcaaatggaattcctaactgtttcagcgccagttcaagccccatgttgctcatcaatgtacccacagcgccaccacgcagctggccctgacgaagaccttcacgcgcgatgatatacatgatctgatcgccatcgactttattgccttcatggtcaaccataatcacgcgatcgccatcgccgtcgaaggcaataccgagatccgctttttcagccagcacacgagcctggagcgcgcgaacgtcggtagcccccacttcggcattgatgtttacaccgtttggctcacaaccgatagcgataacgttcgcccccagttcgcgcagcacgttcggcgcgatgtgataagtcgcaccgtttgcacaatccaccacaatcttcagttcactgaggctaagttcgttcgggaacgtggctttgcaaaactcgatatagcgacccgcggcatcaacgatacggctggctttacccagttctgcgctatcaacgcagctgatctccttttccatttccgcttcgatggcctcttctaccgcatccggcagtttggtgccgtcgatagagaagaatttaatgccattatcgtagaacgggttatggcttgcagatatcacaattccggcctctgcgcggaaggtacgcgtcagataagccacggccggtgttggcatcgggccagtgaagagtgcggaaaggcccgctgccgccagacccgcttccagtgcactctccagcatatagccagaaatacgcgtgtctttaccaataataatcttacgggagccgtggcgcgccagcactttacccgcggcccaacccagcttaagcacaaaatcaggtgtgatcggcgcatcccctacacgaccacgaatcccatcggtaccgaaatatttacgattactcatagcgtttgttttcctttgcagacagagtggcttccaccacccgcatcgcttctacggtttctttgacgtcatgaacacgaatgatgtgcgcgccttgcattgcggcaatgaccgcacaggccagactaccgctcaggcgctcggacggccccacgttcagcagctgcccaatcatgctttttcgactcatacccaccaacagcggcaggttgaaatggtgaaattcagccaggcgcgccagtaaactatagttatgggagagatttttaccgaaaccgaatccggggtcgagcaacaatttctcttttgcgatacccgcctgctcgcaacgtgctatttgctcaataaagtagcgattcacttctgcaaagacatcgtcatacttcggagcttcctgcatggtttttggatttccctgcatatgcatcagacaaaccggtaaaccggtttctgcagccgcctccagagcgccaggttcggaaagggagcggatatcattaataatgtgagcgccaactttcgcactctcacggatgacttctggtttggatgtatcgacactgatccagacttcgaagcgttgagcaattgcctcaaccacaggaataacacgttgcaactcttcttcaacgctaacttccgccgcccctgggcgcgtggactcgccaccaacgtcaatgatcgtcgcgccagcgttgatcatcagattcgcatgtttcaccgcatctatcaggctgttatgcgtgccaccatcgctaaaggaatcaggcgtgacgttgaggatccccattacgtgaggatggctaaggtccagactagtaccctgggcaaagagtttcatgatgttatccctggtatgaattgataagaaaaaaccccggagcacgccccggggttttcggtacaaatacagtcatctgatgcgggaacttacttgtcgcctaactgctcactcatggtgttacccgggttcggcgtacgcggttcatcaaccggacgaggagcctttggactaccattgtcgccagaattgttagaagcgcctggttcttcccagcccgctggcggacgtacatcgcgacgtgccatcaggtcatcaatctgcggtgcgtcgatagtctcatatttcatgagagcatctttcatcgcatgcagaatatccatattgtcggtcagaagctgacgcgcacgattatagttacgctcaatcagtgctttcacttcctggtcgatgatacgtgcagtttcatcggacatatgtttcgctttcgctacgctacggccgaggaacacttcaccttcttcttccgcgtacagcagtggacccaatttctcagagaagccccactgagtcaccatgttacgtgccaggttggtcgcaactttaatatcgttggacgcaccggtagatacatgttccggcccgtagatgatctcttctgccagacgaccaccgtacagcgtagaaatctggctttccagtttctgacggctggcgctgattgcgtcgccctcaggcaagaagaaagtcacacccagcgcacgaccgcgtgggataatcgtcactttgtgcaccggatcgtgttccggcaccaggcgaccgataatcgcatgacccgcttcgtggtaagccgtgctttctttctgcgcttccgtcatcaccatggagcgacgttccgcacccatcatgattttgtctttcgctttctcgaactcaaccatgctcacaacgcgtttgttgccacgagcagcgaacagtgccgcttcgttcaccaggttcgccaggtcagcaccggagaaaccaggagtaccacgggcaatgattgccgcgtcgatatcgggtgccaatggtacgcgacgcatgtgaactttcaggatctgctcacgaccgcgaacatctggcaagccgaccacaacctgacggtcgaaacggccaggacgcagcagggccgggtcgagaacgtccggacggttagtcgcggcgataacgatgataccttcgttaccttcgaagccatccatctcaaccagcatctggttcagagtctgttcacgttcatcgtgaccaccgcccagaccagcgccacgctggcggcctacggcgtcgatttcatcgataaagatgatgcacggtgccgctttcttcgcctgttcgaacatgtcacgaacacgggatgcacccacaccgacgaacatttctacgaagtcagaaccggagatagtaaagaacggaactttcgcttcgcctgcaatcgctttcgccagcagcgttttaccggtacccggaggaccgaccatcaagacgcctttcgggatcttaccgccgagtttctggaagcggctcggctcgcgcagatactcaaccagttcagcaacttcttcttttgcttcgtcgcagcccgcaacgtcagcaaaggtcgttttgatctgatcttccgtcagcatgcgcgctttgctcttaccaaagctcatggcacctttgccaccgccgccctgcatttgacgcatgaagaagatccagacaccaatcagcaacagcatcgggaaccaggagatgaagatagaagccagcaggcttggttcttcaggcggttcaccgacaaccttgacgttcttggtcaacaggttatccagtaatttcggatcctgaaccggaatgtaagtggtataacggttactatctttcttggtaacgttgatttcacgtccgttgatacgcgcttcacgaacctggtcgttattgacctcttgtaggaaggtagagtaatccaccttacggccattagactcgctgggcccaaagctctggaatacactcatcagcacaacggcaatgaccagccagagtattaggtttttcgccatgtcactcaagggattaacctcttattacaactgtgttaaaaacagcgtcaggatactctatatccagcatctttcaaactttcgtctgaaatctcccggttagggtttacgcccggtcgctacaatatacacttcccggctacgtgcacgagaagagtccagcttacgaactttgaccttcgtaaacagggagcgaatttcccttagatactcatcgaaaccttcgccctggaacaccttcactacaaaactgccacctggcgctaatacatcacgacacatttctagcgccagttccaccagatacatggcacgggggatatccaccgccggtgttccgctcatgtttggtgccatatcggacatgacaacctggactttgctgtcgccaacgcgctccagcagtgctttcatcaccagttcatcacgaaaatcgccctgaagaaagtccacaccaacgataggatccataggtaaaagatcgcaagcgatgatgcggcctttgccgccaatttgggtgaccacatattgactccaaccacccggagcagcaccaaggtcgacaaccgtcattcccggtttaaagagtttgtcactttgctgtatttcatcaagtttaaaccaggcacgggaacgtaacccctttttctgtgcctgttgaacatatttatcgctaaagtgttcctgaagccagcggctggagctggcagaacgcttcttacctgtcatttaactttcccatggggataactcatcgtaaccaattgcgtaaatttttacgcgcctatttggtgatatatgggagatggcggtagaatgacccgttttcaatcccaacgtaagcaaaaaatacgatgaatctgagtactaaacaaaaacagcacctgaaaggtctggcacatccgctcaagccagttgttctgcttggcagtaatggtttgaccgaaggggtgctggccgagattgaacaagcgttagagcaccatgaactcatcaaggtgaaaatcgccaccgaagatcgcgaaactaaaaccttgatcgtggaagctatcgtgcgcgaaaccggcgcctgtaatgtacaggtcatcggtaaaacgctggtgctttatcgcccaactaaagaacgtaaaatcagcctgccacgctaagattatcctaaagttacacacatttgctgtgtaaaacgaggggttttccgcaggcaggagagcaaaatgccacgctctgttcgttgataaaaggccgcatagcggcctttttcctttctttacaatacatcaacatcttgagtattgggtaattcttacaggtattccaccttaattacttcaaattctacttcgccgcccggcgttttgatgaccacaacatcatcttcttctttgccgatcaggccacgagcaatagggctgtttacagaaatcaggttttgtttaaagtcagcttcgtcatcgccaacgatgcgataagtctgttcttcgtcagaatccagattcagcaccgttacggtagcaccaaaaataacgcgcccattgttgggcattttggtgacatcaatcacctgcgcgttgctcagcttggcttcgatgtctttaatacggccttcgcagaaaccctgctgttcacgagctgcgtggtattcggcgttttctttcaggtcgccatgctcacgcgcttccgcgatagcagcaatgatttcaggacggcgcacagatttcagaaaatccagctcttcgcgtaatttttcagcgccgcgtaaggtcatcggaatagcttgcatttgttatacctcttgaatattcctgatagggcaagtcttcacccaccccggctgttcggcctgcccggcataactccttaccgggaccagaagcaaaaaaataccgacccgggtacaagtcccaggtcagctacaattcacattttgatagtcattttaccctgaagttcccgaagggtcatcgtttactttatagggcgttgcgccgtagtatgacggctcgattccaggttgttagcgcgagattatgcgattttccagatttatcatcggattgaccagctgtatagcgttcagtgttcaggccgcaaatgttgatgagtacattactcaactccccgctggtgccaaccttgccctgatggtgcaaaaagtcggcgcgagcgcccccgctattgattaccacagtcagcagatggcgctgcctgccagtacccagaaagtgattactgcgctggcggcgttgattcaactcggccccgattttcgttttaccacgacgcttgaaaccaaaggcaatgtggaaaacggcgtacttaagggtgacttagtggcgcgatttggtgccgatccgacgttaaaacgtcaggatattcgcaatatggtcgcgactttgaaaaaatctggcgtcaaccaaatcgatggcaatgtgttgatagatacctccattttcgccagccacgataaagcccccggctggccatggaatgacatgacacaatgctttagcgctccgcctgccgccgccatagttgaccgcaactgtttctccgtcagcctctacagtgccccaaagcctggtgatatggcttttatacgcgtggcatcttattaccccgttacgatgttcagccaggtacgcaccctcccccgtggttctgccgaagcgcaatactgcgaactggatgtggtgccaggcgacctgaaccgctttacgctgacgggatgcctgccacaacgttctgagccgctcccgttggcttttgccgtgcaggatggagccagctatgccggtgcaattctgaaagatgagttaaaacaggcgggtatcacctggagcggaacactgctgcgccagactcaggttaacgaacctggaacggtagttgccagtaaacagagcgccccgctgcacgatctgcttaagattatgctgaaaaagagcgacaacatgatcgccgatacggttttccgcatgataggccatgcgcgcttcaatgtgcctggaacatggcgggccgggagcgacgccgtgcgtcagatcctgcgccagcaagccggtgtcgatattggaaacaccattattgccgatggtagtgggcttagccggcataacctgattgcccccgccaccatgatgcaggtgctgcaatacattgcccaacacgacaatgaacttaactttatctccatgctgccgctggcgggctatgacggctctttgcagtaccgtgcaggtctgcatcaggcgggcgtggatggaaaagtcagtgcgaaaaccggtagcttgcagggggtatataacctggcgggattcattaccacagcgagcgggcaacgaatggcgtttgtgcaatatctttctggctatgcagtagaacctgcggatcagcgtaatcgccgtattccgttagtgcgttttgaaagccgtttgtataaagatatttatcagaacaattaatcaaaaagaaaccccggcacatggccggggcttcagattattgacaaagtgcgctttgtttatgccggatgcggcgtaaacgccttatccggcctacaaaatcgtgcaaattcaacatattgcaattctcttgtaggcctgataagcgtagcgcatcaggctgatttggcgtttatcatcagtgattaacgcttgtaaatgaactcaacgccttcttcgtcgtcttcgtcccagtcgtcatcccagtcttcatcatcctcttcagcaatctcttcaagctgctggcgatgataatcatcccacatgaattcgactttctctggctgtttcgcttcttcagcctgcacgaccgggttttcaatgataaaggtcatcacatcccagcagagatctttcacgcccagtccactcgccgcagagatcagataatatttatcttcccagcccagcgcctcagcgatcgctttcgctttctcttcggcttctaccttatccagcagatcgatcttgttgaacactaaccaacgcggtttcgtcgccagatcctggctgtatttttccagctcgctgataataatacgcgcgttttcaaccggatcggtgccgtcaatcggatcgatatcgatgaggtgcaacaggacgcggcaacgttccaggtgcttcaggaagcgaatgcccagacctgcgccttccgcagcgccttcaatcagtcctggaatatcggcaacaacgaagctcttttcgttgtccattcgtaccacacccagacttggcaccagagtggtaaacggataatccgccactttcggtttagccgcgcttaccgcacgaataaaggtgcttttacccgcgtttggcatccccaacataccgacgtcagccagcagcatcagctccagcagcagctcgcgcttatcgcccggcgtgccgttggttttctgccgcggtgtacggttaacggagcttttgaaacgggtattgcccagaccgtgccagccgcccttagcaaccagcagacgctgaccgtgtttggtcatatcgcccatggtttcaccagtaccctggtcgattacacgcgtacctaccggcactttaatcgtcacgtctttaccgcgcttaccggtacagtcgcggcttgcgccattctgaccgcgctctgcacggaaagatttttcaaaacgataatcgataagcgtgttcaggttctcgtcggcttccatccatacgtcaccaccatcaccgccgtcgccgccatccgggccgcctttcggaatatacttttcgcggcggaagctcacgcaaccattaccgccatcacctgcaacgaccagaatgcttgcttcatcaacaaacttcattttattctccgtaaatcattcgcctgcgcggggttggcttaccaccgttgtatgcttacgtaatccgccccaaatacgatgaccaatggcggaatacatcgcgcccgcaaccacgacaaacgcaccgagataacctaaaaggtttaacatcggtctggcgaagaaatcgggccaggccagacttaaaagatcactaaaaaacagcgtaaacagtggggtgagcgtgatgatcgcgctcacctgcgctgcctgccagcgagccatcgcttccgccagggcgccatatcctaccaaggtattcagtccgcaaaaaattaaacatgcgagctgccagtggctaagctgcgctatcactccaggctttgccagagggaagagcgcaattgtacataaagtgtacagtaaaaacaggatctgcggactggccagccgacgcaataaaaccttttgcgccacgccataactcacccaaaccgtcgccgcaccgaccccaaagataactccccaggtgtaatcggtgagctttgtaaatatctcgaccagactggtgttaaaaaacatcaccaggccgctcaggagcatcaatgcccctacaacctgagtgctgcgcattttctctttgaggataaatacgctggcaaccatcatgccaactgggctgagttgcccaatcacctggctagcggtcggactcaggtattgcaaggaactgctgaacaggatgaagttcccaaacagcccggcggtcgccactgccaacaaaatcaaccagcgtggcttacgaaacacgcgtaatggcggcaacctcttcttcaccgcaagaatggcacccaggccaatactcgccatcaagaaacggtaaaacacgattgtcggaggttccatcacctccagcacctgcttcattgcgattggcaacgccccccagcaaattgctgtggtgagcgccaaaagaatgccaatgcctgcctgctgcttcataccgtattccctgcaaagcgcatttgcggattaacgtcgcaccatgcgcatttttaccggttatcgaatgtaaaaagccccgcaacgtgttgcggggctttcatccgttaccgggacgcgaaaaacttattcagcttcgatgctgataaatttacggtttttcgggcctttaacttcgaatttcactttaccgtctgctttagcaaacagagtgtggtcacgaccgcaacctacgttagcgccagcgtggaatttggtaccacgttgacgaacgatgatgctacccgccagaacggattcgccaccgaaacgcttaacgcccaggcgtttagcttcactatcgcgaccgttacgtgtggagccgccagcctttttatgtgccatttgaaatctctcctcaggtcttaggcgctgatgccagtaattttcacatcagtgaaccactgacgatggccctgctgcttacgatagtgtttacgacgacgaaacttaacgattttaactttctcgccacgaccgtgagcaacaacttcagctttgattacgccgccatcaacgaaaggaacgccgattttgacttcttcaccgtttgcgatcatcagcacttcagcgaactcaacagtttcgccagttgcgatgtccagcttttccaggcgaacggtctgaccttcgcttactcggtgttgtttaccaccactttggaaaaccgcgtacatataaaactccgcttccgcgcacaccttttcaatgattcagagtgcgctataaatattcacaatagggcgcgaatattacgcaaaacgcacgcctttgacaagtgctacagtcaatacacgaagaaaaaaaacacaacttgtacggtaacgtttatctgtgccattttttcagtacaatcaccctatattcctaaccataaaccctaagttgcctttgttcacagtaaggtaatcggggcgaaaagcccggcttttgcgatgaatttagaaaaaatcaatgagttaaccgcgcaagatatggcgggtgttaatgcggcaatccttgagcagcttaattccgacgtccaactgatcaatcagttaggctattacatcgtcagcggcggcggtaaacgtattcgtccgatgattgctgtactggctgcacgagctgttggctatgagggaaatgcgcatgtcaccattgctgccctgatcgagtttatccacacggcgactctgctacacgacgacgttgtggatgaaagtgatatgcgcaggggtaaagctaccgccaacgccgcatttggcaatgccgccagcgtgctggtaggcgattttatttatacccgcgctttccagatgatgaccagcctcggtagcctcaaagtgctggaagtcatgagtgaagccgtaaacgtcatcgcagaaggtgaagttctgcaactgatgaacgttaacgatccggacatcactgaagaaaactacatgcgcgttatctatagcaaaaccgcgcgtctgtttgaggctgccgcgcagtgttccgggattctggctggctgtacgccggaggaggagaaaggcctgcaggattatgggcgctatctcggcactgctttccagttgatcgacgatttactcgattacaatgccgatggcgaacagttaggtaaaaatgtcggcgacgatctgaacgaaggtaaaccgacgctgccgctgctgcatgcgatgcatcatggcacaccagaacaggcacagatgatccgtaccgccatcgaacagggtaacggtcgccatcttctggaaccggttctggaagcaatgaacgcttgtggatctcttgaatggacgcgtcagcgtgccgaggaagaagcagacaaagccatcgcagcgttacaggtgctcccggacaccccttggcgagaagcactcatcggcctcgcgcacatcgctgttcaacgcgatcgttaatcccctcccctcatcccgcgcagcgcgcgggatggttccagtaagttccataaaaacacttattcagctctataacacctgaaaaatagggatgtgcatctttatatattctgaatattcacactctttacaggaactttttagagcaataggccatcaggagtatagtgatgctcgacagaagaagtgttctgaatgaaagcgactaacttaaggagtgaggaaaaatggaaagtaatttcattgactggcatcccgctgacatcattgcgggtttgcgcaagaagggaacgagtatggcggcggaatctcgcagaaatggtttgagttccagtacgctggcgaatgcattaagccgcccatggccgaaaggagagatgattattgcgaaagccctgggaactgacccctgggttatctggccaagtcgctaccatgatccgcagacccatgagtttatcgacagaacgcagttgatgcgtagctacactaaaccgaaaaaatgagtggtctggcggtagccccgcgaacggggctgccagctctcagacgattattcgcctttcacacgctcaatatttgcacctaaagcgcgcagtttgtcttcaatgcgttcgtagccacgatcgatgtgataaatacgatcaaccaccgtcgtcccttccgcaatacagccagccagcaccaggcttgcacttgcacgcagatcggttgccataacctgtgcgccagaaagtttttcaacaccgtgacaaataacggtattgctttcgatttcggcgtgcgcgcccatacggctcagctctggcacatgcataaagcggttttcaaagaccgtttcggtgataaacccggtcccttctgccaccaggttcaacagcgtgaactgggcctgcatatcggtcgggaatgccggatgcggcgcggtacgtacgttaacagccttcggacgtttgccatgcatatccaggctaatccagtcttcgccgacttcgatgtccgctccagcgtcacgcagtttcgccagcacggcgtcgagagtatctggctgcgcgttacggcagataattttgccgcgagaaatcgccgccgccaccaggaaagtaccggtttcgatacgatccggcagaacgcgatagacaccgccgcctaaacgttccacaccttcgatgacgatacgatcggtgccctgaccgctaattttcgcacccagcgtaatcaggaagttcgcggtatcgacgatttccggttcacgcgctgcgttttcaataatcgtggtgccttccgccagggttgcagcacacatgatggtcaccgttgcgccaacgctgactttatccatcacgatatgtgcacctttcaaacgaccatcgacggaagctttaacgtaaccttcttccagtttgatggtcgcgcctaattgttcgaggccagaaatgtgtagatcaaccggacgcgcaccgatcgtacaaccgccaggtagactaacttgcccctgaccaaagcgcgctaccagcggccccagcgcccagatagaagcacgcatggttttaaccagatcgtaaggtgcgcagaatacattaacgtcgcgggcatcaatatgcacagaaccattacgttctactttcgcacccagctggcttagcagcttcatacttgtatcgacgtctttcagtttcgggacgttctggatctctaccggttcttccgccagtagtgcggcaaaaaggataggcagagcagcatttttagcgccggaaattgtgacttcgccctggagcttcgttggcccctgaacacgaaatttatccatttagtttgttctcagttaacaattcatatccgctaccggcgaatcgcccatagctcaaaagccgttcagtttgcgatcgcgcgcccactccgcaggggtatacgctttgatgctcacagcatgaatgcggttatccgcaatatattccatcagcggaccatagaccgtctgctgttttttaacccgactcatgccgtcaaacaactcacccacggcaataacctgaaagtggctgccatcgccggaaacgtggacttcctggagggagagagcgttcatcaacacgctctgaatttcattattttccatgggatcttcaatcatcagttaataaaccagcgaaacatcttagagcaaagttgcgctggcataaataagcaaaaagcctcgctgataaatcagacaaggctcgacttgcaggcaggtttgccggacaggcggttaacgccatatccggcctgaaaaaatttaacgaggcagaacatcagcaggcaaattatacaatttcgccagggtatacactttgtcgtttaccccctgaagcgtcacattgttgccctgctttttcgccagatcgataagatggagcagcagtgccagtccccccgtatccacgcgggagacacggctaagatcgatgcaggtaatccccttcaccgcttcctcacgcatttcccaaagcggtagcaaaacgtcctgatccagctctccggataacgccagcgtgtcacccgtctgcatccagctcagactctcgctcattattttttctcttccagagtgattttctgttgagaaatgcttttcagttgcgcagtcaggccgtcgatacctttggtacgcagcagcgttccccactcgttttgtttggtggtgatcatactgacgccttcagcaatcatgtcgtaagcctgccaattgcccgtctgggagtttttacgccactggaagtccagacgcaccggcggacggccattcgggtcaataatggtaacgcgaataggcacaatggttttatcgcccagcggctgttctggcgcaatctgataggtttgaccgtgatacatcgccagcgcctgaccgtaagcctgcttcaggtactcacggaaagcggcaaagtaggcttcacgttgagcaggggtcgcactcttgtaatactggcccagcaccagcgcaccggcgtatttcacctgtacgtatggcagcagttcctgatcaacaatggtacgcagataatccgggttggcccgaatttgcggttgctcattcttcaggcgatcgaacgttttctgcgccgcctcgtccatcagcttatacggattggtctggtctgccgcggttgccgcactcagaggtgcaatcaccagcaaagcgaccatcattaaacgtttaaacatgcgtcggttctcctgaaattatttcgttgtacccacaggttcagtggtttcattattacctggcgcagcagctggcgcatcgccactattcttattgtcatcgcctttactaccgtaaaggaactgaccaatgagatcttccagcaccatcgcagacttagtgtcctgaattgtatcgccatccttcaggatagcagtccccagttccgggtcttcaaaaccgacgtttaatgccagatattgttcccccagcaggccggaagtacgaatgctcaggctactggtatctggaatgtggttataacgttgttcaatttccagcgttacgcgcggcagataggttttcgggtccagcgtaatatccgccacccgacccacaacaacgccaccaatactgaccggagagcgcgctttcaggccgccaatgttatcgaacgtcgcataaagcgtgtaggtcggttcagtacgtatggacgtcacgttcgccgccttcaggcaaacaaacagcgccgccagcagtgctgctaataaaaagatacccacccaaatttcattttttttcgtttgcatgaactcaattcccaaacatcaatgcggtcagcacaaaatccagccccagaacagccagagagctgtggacaacggtgcgagtggttgcccggctaatcccggcagacgtcgggatggcgtcgtagccgttaaacaagctaatccacgtcaccgtgatggcgaacaccacgctcttaatcagacagttgaccagatccatacgccagtcgacggcattttgcattgcgctccagaagaacccgctatcaatgcctttccaactgacgccgaccagagatccgccccagatccccacggcgacgaaaataaccgtcaacagtggtaaactaataaccccagcccagaaacggggagaaataacccgacgcagcggatccaccgccatcatctccatactggagagttgctctgtagcgcgcatcaggccgatttctgcggttagcgcgctaccagcacgcccggcaaacaacaacgcggcaaccaccggccccagttcacgcagtaggcttaacgccaccagcatacccagactggtttccgcactataagtggtcagaaccagataaccttgcagccccaacaccattccgatgaacacgccagaaaccacaataatcagcatgctcaggacgccgacattatagagctggcgcaccagcagcggcgcatgtttgcgaaattccggtttgccgaccagcgcattgaataacattaacccggcccgcccgaacgttctcagggttttaatccctttatgtccgaggctcgccagcgcatttaacagcatgagtggcttaactccctggtaaaagatcagcgtgataatcgccggcaggatagcggaacggaacaggcccgtcagctatcccgtccagaaactgacgtacgcgcggatcaggattcgcctgcaacgcctgggcactgccatgagcgacaatttttttgtccgccaggatccaggcgtgatccgcaatacttaacacttccggcacatcgtgagaaaccaccacacaagtcacgcccagcgcgctgttcagctcagaaatcagcttcaccagtacgcccatggtgatgggatcttgcccaacaaaaggttcatcaaacatgatgagatccggctccagcgcaatcgcacgcgccagcgctgcacgccgcgccatcccaccggaaagttcagaaggcattagtttagccgctccacgcagccccacggcctccagcttcatcatcaccgtactatgcaacaatggcgcgggaagttgggtatgttcgcgcagtggataggcgacgttgtcaaatacgttcatatcagtgaacaacgccccggactgaaataacatgctcatccgtttgcgcactgtatacaggcggctacgagacatcgccggaatattctcaccatcgaaaaggatctcaccatgatctggtgcgatttgcccgccaatcagacggagtagcgtcgttttaccgatgccgcttggccccatgatcgccgtgatcttccctcgcggcacggtcagggaaatattatcgaagatgcagcgattgccacgcgtaaaactgacatcgcgcatatcgactaaattcgccacagactgctccataattcacccttcgtcttgcgttgattttctaagcatggcgctcaatttaaccttgaacccaacatatttacagaatattacccgccgtggttagcgaaagctggcatttgttttactttttagccgcataaagtcaaaattaagcatccgttacggctttctgaaaatcttcagcggaccggcgagtatacctgaagaaaggacgttagatgcttttagctacggcactgttaattgttggtttacttttggtcgtttacagtgccgaccgcctggtttttgccgcgtctattctttgccgaacctttggcatcccgccgctgatcatcggcatgacggtggtcagtattggtacaagcttaccagaagtcatcgtcagccttgccgcgtctctgcacgaacaacgcgatttagccgttggtacagccctcggcagtaacattatcaatatattgctgatcctcggtctggctgcgctggttcgtccttttaccgtccattctgatgttctacgccgtgaattacccttaatgttgttggtcagcgtggtggccggttccgtactctatgacggacaacttagtcgcagcgatggtatctttctcctctttctggctgtgctatggctgctgttcattgttaaacttgcacgtcaggctgaacgtcaggggactgacagcctgaccagagagcagcttgcagagctgccgcgtgacggcggattgcccgtcgcgtttttatggctcggcattgcgcttatcatcatgccagtggccacgcggatggtggttgataacgccacggtgctggcgaattactttgccatcagcgagttgacgatgggtctgacggcaattgctatcggaaccagcctgccggaactggcaaccgcaatagcgggggttcgcaaaggtgaaaacgacattgctgtcggaaatatcattggcgcaaacatttttaatattgtcatcgtgttgggtttacccgcgctgataacgccaggagagattgatccactggcgtacagtcgtgactacagcgtgatgttgctggtgagcattatttttgcgttgctgtgctggcggcgctccccgcaaccgggccgtggtgtaggggtattattaactggcggatttatcgtatggctggcgatgttgtactggttaagcccaatactcgttgaataactggaaacgcattatgagccacgtagagttacaaccgggttttgactttcagcaagcaggtaaagaagtcctggcgattgaacgtgaatgcctggcggagcttgatcaatacatcaatcagaatttcacgcttgcctgtgaaaagatgttctggtgtaaagggaaagttgtcgtcatggggatgggaaaaagcgggcatattgggcgaaaaatggcggcaacgtttgccagcaccggtacacctagttttttcgtccatcctggtgaagccgcgcatggtgatttaggcatggttaccccacaggatgtggtgattgctatctctaactctggtgaatccagcgaaatcacggccttaattccagtgcttaagcgtcttcacgtaccgttaatctgcatcaccggtcgcccggagagcagcatggcgcgcgccgcagatgtgcatctgtgtgttaaagtagcgaaagaagcctgtccgttagggctggcaccgaccagcagcaccaccgccacgctggttatgggcgatgccctcgctgtcgcgctgttaaaagcacgcggctttactgctgaagattttgcgctcagtcacccaggcggcgcactgggtcgtaaacttctgctgcgcgtaaacgatattatgcatacgggcgatgagatcccgcatgttaagaaaacggccagtctgcgtgacgcgttgctggaagttacccgcaaaaatcttggtatgactgtcatttgcgatgacaatatgatgattgaaggcatctttaccgacggtgatttacgccgtgtcttcgatatgggcgtggatgttcgtcagttaagtattgccgatgtgatgacgccggggggaatacgtgtgcgccctggcattctggccgttgaggcactgaacttaatgcagtcccgccatatcacctccgtgatggttgccgatggcgaccatttactcggtgtgttacatatgcatgatttactgcgtgcaggcgtagtgtaaagattcaaggataaacaacaatgagcaaagcaggtgcgagccttgcgacctgttacggccctgtcagcgccgacgttatagcaaaagcagagaacattcgtctgctgatcctcgatgtcgatggcgtactgagtgatggcctgatttatatgggcaataatggcgaagagctgaaagcgttcaatgttcgtgacggttatggcattcgttgtgcgctcacctctgatattgaagtcgctatcattaccgggcgaaaggctaaactggtagaagatcgttgtgccacattggggatcactcacttgtatcaggggcagagtaacaaactgatcgcctttagcgatctgctggaaaaactggcgattgccccggaaaatgtggcttatgtcggcgatgatctcatcgactggccggtaatggaaaaagtgggtttaagcgtcgccgtggccgatgcgcatccactgttgatcccgcgcgccgattacgtgacgcgcattgctggcggtcgtggcgcagtgcgcgaagtttgcgacttattactcctggcgcagggcaaactggatgaagccaaagggcaaagcatatgagtaaagccagacgttgggttatcattgtgctaagtctggcggttctggtgatgatcggcattaatatggccgaaaaagacgataccgcccaggtggtcgtcaacaacaatgatcccacctataaaagcgagcatacggacacgctcgtctataacccagaaggggcactaagctatcgattgattgctcaacacgttgaatattattccgatcaggccgttagctggtttacgcagccggtacttaccacgtttgataaggataaaatcccgacatggtccgtaaaagcagataaagccaagctgaccaatgaccggatgctctatttatatggacacgttgaagtcaacgcacttgtgccagactctcaacttcgcagaatcacgacggataacgcgcagatcaatctggtgacgcaggatgttacctctgaagacctcgtcacgttatacggaacaacatttaactccagcggtctgaaaatgcgcggcaacttacgcagcaagaacgccgagctgattgaaaaggttagaacatcctatgaaattcaaaacaaacaaactcagccttaatcttgtgcttgccagcagtcttctggccgccagcattccggcatttgccgtaaccggagacactgatcagccgatccacattgaaagcgaccagcaatctcttgatatgcaaggcaacgtggttacctttaccggtaatgtcatcgtcacccagggcaccatcaaaattaatgccgacaaagtggtcgttacccgtccgggcggcgaacaaggtaaagaagtgattgacggctacggtaaaccggcaacgttctaccagatgcaggacaacggtaaacccgttgaaggtcacgcttcccagatgcactacgaactggcaaaagattttgtcgttctgacgggtaatgcttatctgcagcaggtcgatagcaacattaagggcgataagatcacttacctggtgaaagagcagaaaatgcaggctttcagcgacaaaggcaagcgcgtaacaaccgttctggtgccgagccagctgcaggacaaaaacaacaaaggccagaccccggcacagaagaagggtaattaattcgttatggcaacattaactgcaaagaaccttgcaaaagcctataaaggccgtcgcgtggtagaagacgtcagcctgaccgtcaactccggggaaattgtcggtctgctggggccaaacggtgccggtaagaccaccactttctacatggttgtaggcattgtgccgcgcgatgcgggcaacatcattattgatgatgacgatatcagtctgctgcctctgcatgcacgcgcgcgccgcggtatcggctatctgccacaggaagcctccattttccgtcgcctcagcgtttacgataacctgatggcggtactgcaaattcgtgacgacttgtctgctgaacaacgtgaagaccgcgcgaacgagctgatggaagagtttcacattgagcacctgcgtgacagcatggggcagagtctctccgggggtgaacgtcgccgtgtagaaattgcccgcgcactggctgcgaatccgaaatttattctgctcgacgaaccgtttgccggggttgacccgatcagcgttatcgacattaaacgcatcattgagcacctgcgcgacagcggcctgggcgtgctgatcactgaccacaacgtgcgtgaaacactggcggtttgtgaacgcgcttatatcgtcagtcaggggcatttgatcgcccacggcacgcctacagaaatcttacaagacgaacacgttaagcgtgtataccttggggaagacttcagactctgatagggtagaagtttgcgacgttttagcaggagagtacgattctgaacatgaagcaaggtttgcaactcaggcttagccaacaactggcgatgacgccacagctccaacaggcaattcgtctgttgcagttgagcacgctggaacttcagcaggagctacagcaggcgctggagagtaatccgctgcttgagcaaatcgacactcatgaagaaatcgacacccgcgaaacgcaagacagtgaaacgctggacaccgccgacgcgctcgaacaaaaagagatgccggaagagctgccgctcgatgccagttgggacaccatttacaccgctggtacaccatccggcaccagcggtgactacattgacgacgagctgccggtctaccagggcgaaacgacgcagaccttgcaggattacctgatgtggcaggttgagctgacaccgttttccgacactgaccgcgctattgctacctctatcgtcgatgccgttgatgaaaccggttatctgactgtcccgctggaagatattctcgaaagtataggcgatgaagagatcgacatcgacgaagttgaagccgtccttaagcggatccaacggtttgatccggtcggtgtggcggcaaaagatctgcgtgactgtctgctgatccaactctcccaattcgataagaccacgccgtggctggaagaggccagactgatcattagcgatcatctcgatctgttagccaatcacgacttccgcactttaatgcgcgtcacgcgtctgaaagaagatgtgctgaaagaagccgtcaatctgatccagagcctcgatccgcgccccgggcagagcatccagactggcgaacctgagtatgtcattccagatgtgctggtgcgtaagcataacggtcactggacggtagaactcaacagtgacagcattccgcgtctgcaaatcaaccagcactacgccagcatgtgcaataacgcgcgcaacgatggtgacagccagtttatccgcagcaatctgcaggatgccaaatggttgatcaagagtctggaaagccgtaacgatacgctactgcgcgtgagtcgctgtatcgttgaacagcagcaagccttctttgagcaaggtgaagaatatatgaaaccgatggtactggccgatatcgcccaggctgtcgaaatgcatgaaagcacgatatctcgcgtgaccacgcaaaaatacctgcatagtccacgaggcatttttgaactgaagtatttcttttccagtcacgtcaataccgagggcggcggcgaagcttcctccacggcgattcgtgcgctggtgaagaaattaatcgcggcggaaaacccagcgaaaccgttgagcgacagcaagttaacctctttgctgagcgaacaaggtatcatggtggcacgccgcactgttgcgaagtaccgagagtctttatccattccgccgagtaaccagcgtaaacaactcgtttgacccaaccgataaggaagacactatgcagctcaacattaccggaaataacgtcgagatcaccgaggcactgcgcgaatttgttacagccaaatttgccaaacttgagcaatattttgaccgaatcaaccaggtctatgttgttctgaaagtggagaaagtcacccacaccagtgatgcaacactgcatgtaaacggtggtgaaattcatgccagcgcggaaggtcaggacatgtacgctgccattgatggcttaattgataagctggcacgccagttgaccaaacataaagataaactgaaacaacactaattgtccgggcaattagcatgtgcatggcggtctgttgtgcggcacaacgggccatttgtacggttaatgctccgagcctgttccactgtttgagtgggcaggttcttaggtgaaattatgacaaataatgatacaactctacagcttagcagtgttcttaacagggaatgtacgcgaagccgcgtccactgtcagagcaaaaaacgcgccctggaaatcatcagcgagctggcggcgaaacaacttagcctgccgcctcaggtggtttttgaagctatcctgacgcgggaaaaaatgggcagtaccggtatcggcaatggtattgccattccgcatggcaaactggaagaagatactctgcgcgccgttggcgttttcgttcagctcgaaacgcctatagctttcgatgccatcgacaaccaaccggtggacttactttttgccctgctggtgccggcagaccaaactaaaacgcacctgcatactctgagcctggtggcgaaacgtctggcggacaaaaccatctgccgccgtttacgcgcagcccagagcgatgaagagctgtatcaaatcattacggataccgaaggtactccggatgaagcgtaattattcggtaatgtctcttttagacgttgtgaggagaaacagtacatggtactgatgatcgtcagcggacgtagtggtagtggtaaatctgtcgccctgcgtgcgctggaagatatgggtttttactgcgtggataaccttcccgtagtgttgttacccgatctggctcgaaccctggccgatcgcgagatttctgccgccgtcagcattgatgttcgtaatatgccggagagtccagaaatattcgaacaggcgatgagtaacctgcctgacgctttcagtccgcaactcctgttcctggatgccgaccgtaataccttaattcgtcgttacagtgacacgcgccgactgcatccgctttccagcaaaaacctgagcctggaaagtgctatcgacaaagaaagcgatttgctggagcctctgcgtagccgagcggatctgattgtcgataccagtgaaatgtccgttcacgagctggctgaaatgctgcgtacccgtctgctgggtaaacgtgaacgcgaactgaccatggtctttgagtctttcggcttcaaacacggtatccctatcgatgcagattacgtctttgacgtgcgcttcttgccgaacccgcactgggatccgaaactgcgtccaatgacaggtcttgataaacctgtcgccgcgttcctcgaccgccacacagaagtacacaattttatctaccagacgcgaagctatcttgagctatggttacctatgctggaaaccaacaaccgtagctacttgacggtcgccattggttgtaccggcgggaagcaccgtagcgtgtatattgcagagcaactggcagactacttccgcagccgcggtaaaaacgtccagagtcgccatcgtacgctggaaaaacgtaaaccatgaccgtcaagcaaactgttgaaatcacaaacaagctgggcatgcatgcccggcctgcaatgaagctgtttgaattaatgcagggttttgacgctgaagtgctcttacgtaatgacgaaggcaccgaggctgaagccaacagcgttattgcgctgctgatgttggattctgccaaaggacggcagattgaagttgaagcgaccggtccacaggaagaggaagcactggccgccgttatcgccctctttaattctggttttgatgaagattaatcttcatcactttgacatacaactcccttcaaactccccccgacaataagaaaatcacgtactgaaatcgttctcaatcaacgtcatttgtacattttgtgcgcttttcactttcagaagaaccttaagaaaaccttaagaggcattgtttaggttttgtttaagttaatcgaccatactggagatcgtcagaaaatatttccaggagatggcatgattcgcttatctgaacaaagtcccctgggcaccggaagacatcggaaatgttatgcgcatccggaagatgcccaacgctgtatcaagattgtctaccatcgtggcgatggtggcgataaagagatccgccgtgagttaaagtactacgcgcatcttggtcgccggttaaaagactggagtggaataccgcgctatcacggtaccgttgagacggattgcggaaccggttatgtctacgatgtgattgcagattttgacggcaagccttccattacgctgaccgaatttgctgaacaatgccgttacgaagaagacattgcacaactgcgccagctactgaaacagctgaagcgttatttgcaggataaccgtatcgtgacgatgagcctgaagccgcagaatatcctctgtcaccgcatcagtgagagtgaggttatcccggtcgtctgcgacaacattggtgaaagcacattgattccactggcgacctggagcaagtggtgttgtctgcgtaagcaagagcggttatggaaacgatttatcgcccaaccggcgctggctattgccctgcagaaagatctgcaacctcgtgagagcaaaacgctggccctcactagccgcgaagcttaatccagctggtgttgttgcataaacggctcaccgcctaactgatacatctgccgtaaaatccacgcctgacggctacgcacgtagccgcttgggctggagactttgaaacgaagtggattaggtaatacagctgccagtaatgcagcttcgctccgggtaagtttgctcgcgggtttgtggaaataacgttgtgccgcagcttcgacgccaaacacaccgtcgccaaattcggcgatattcaggtaaaccgtcaggatacgctttttgctccagaccgtttctatccccagcgttaatccggcttccagcccttttcgaacccagctacgcccatcccataaaaagagatttttggctgtctgttgagaaatcgtactagcaccgcgaatacggttttcattgcgctcgttgtgcgccagggctttctcaatggaagcgacatcaaagccccagtgctcaggaaatttctgatcttctgcggcaatcaccgccagtcccatccacgggctgatttgatccatactgacccagtcagaatgtgccacgtaacgaaaattgccatgcagccaggcgctgacctgtcgctcgaccattaccgcactgaagggaacaggcgcaacgctaaacaacgcgatgcccccgccccagaaaacggcgaggacaaccattaaccgcaaaagaaaacggcgaacgaaactaaacaccgttaagcggcttttactcattcagccagaaccagcacgcgggaaaccagcttatcaatgccgctcgccgcttctgcaatgttctgcgccagcatatatgctggggtggtgacaatcttattgtcttcatcaaccacgatatcatcgacaggacacggcacatgctccgcgcccatctcttccagcacttctgcggtatcgatatcagtaccgatggtcaaacgcagcgggaaatcgaaaattttcggcagcatcgccggggcaatacacataaaaccaagcggttttccggcctgatgcatcgcttgtgccagcgcctttaattcacggtcaacggtgcattcgctaccaagactggcaaaattgcttaaattcttcgccgcgccaaacccccccggcacaatcaacgcatccagttcagcggcatcggcctgggccagaggacggatttcaccgcgcgttattcgtgccgcttcaatcagcacattgcgcgtttccgtcatcgcttcgccagttaaatggttgataacatcaacctgctgcttatccggtgcaaagcagaccgcctgcgcaccgctgcgactaatagctaacaacgtcaacaccgcttcatgaatttcagaaccgtcatagacgccgcatccgctcagaattacgccaattttcttcattgtgatcatcctttcgcaattgactgaaacacattaatttttttaataaaaatggtacgcatcacacatttaactgattcatgtaacaaatcatttaagttttgctatcttaactgcgtgcggcctgaaaaacagtgctgtgcccttgtaactcatcataataatttacggcgcagccaagatttccctggtgttggcgcagtattcgcgcaccccggtctagccggggtcattttttagtggcttttgccacccacgctttcagcacttctacgtcgtgacgccactcttctttcatctcttcaatccattcaccgacgttatcttcccaggccggaaggtcaggagactgaatttgctgacccagctgttgcagatggcgtaaccccacactccccgccgcacctttaattttatgtccttcctcaacaatgccttttttatcctgcgccgtcagattgctctccagcacgctgacatagcccggcatcatcttctcaaacaccgctaacccgtcggtgatcagcttcggtcctacaagttcgagatactgttccagcatgggaatatcgagcaatgcttcacttttactgttctcttctgtcgtcaccgtactctcctcatcatcctgggtatcccagaatttcttgatcatcgcggttagcgccggaacagaaagcggcttactcagcacatcatccattccagcattgaggtactcttgtttgtctttcagcacgttagcggttaaggccaccagcggcggtaaatcctcgcgcggataacgtttcgtcagttcacgagagatatccagcccggtcatatctggcaactgaatatccagcaacaccaggtcgtattcgcccggtttaaacatctccagcgccgccttgccggtcatggcgacatcaacgctgttacctaatttttccagcacagaacgcgcaacaatcacgttcagttcaatgtcttccaccagcagcacattcagcgccggtaaaggcatatcgtcttcatcaaacgcatcatcgacctcttctgctacgctcggtgcgtggatcgtcaacgtaaaggtactacctttgccctgttcgctggtaaccgtaatatcgccgcccatatttttcgccagacgacgagaaacggccagaccaataccggtgccggtggcaggtttaccgccatgactgtctttcacctggtaatacatggcgaaaattttatccagctcatcctgcggaatgccgataccagagtcttccacttcaaaatgcagcatatcgccttcatcgtagcgcacgcgcacggtaacctggccttgctgggtgaatttgacggcgttactgatgaggttccacaggatctgccgtaaacgcgtcccgtcggtaatgacctgatgcggtaatggcagcgtcggctccaggttaaagcgcaatcctttttgttgcgcctgcaatgcggagagattttccagatcggcaaggaagctggtgaaatcaaccggttgattatcaagctggaccttgcgccgttccatcttatccatgtcgataatatcgttaaagatattccccagcgtgacggcgctaacatggatggtcttgagatatttttcctgctcggcggtgagttcggtatccagcagaatgcggctcagaccgacgataccgttcagcggtgtacgcaattcgtgactgatggtggagataaacgtcgttttgtcgcggctggcccgttcaagcgcatcctgataccgcttacgctcggtaatgtcgcgaccaaagcccatcaaaccgtgacgtttacccacgcggtcgtagtacggcactttacggatttcaaagcaggctttgcgcccgtccgggtaatccagccactgttcataggtcagactcacattatgacggaacactttttcatcggtttcaatgacttttgcggcggcttccggactgtaaacatcagcaggtttcaggtgaaccagttgtttttcgctttttccggtcagcagctccatcgcgcggttacagccggaaaactctttatcttcgttacgataaaaaaccaggtcgggactagcatcaaggaaggaacgtaagaaactggattgctgctcgagctgaatttgtgtctcttcgcgctctttgatttcaattttcagttggccgaaggtttcctgcagttctgcttccgctttttcacgaacggcaatttcctgatttagctgggcaatattatcttttaactgaacgttgaggctcaaatcgcgctcgcgcatctcctccagtttttgcaccagccgactcagacgttgtcgactctcctccagttgctcgacgaccacgcttagaaagtagaccgcccacggcgtaatcagcaaaccaaagaagatagaacgaataacatcaatgctttcgacctgaccatgcagcaccatggttaccgccatttgtaccacaatggcaagaacgacgagggccagcgccagcaacatactgaagcgcaccagacctaacttcatcatcaggtcaacataatactgcgccagcagacgaatttgcttcattagggaattccttcacgacaacctgccccaataatacccaattctgacagttacgttataaattgtgtgagaaatgcggaattcccctcaacgacttactccgttggaggtagccacggacgtcccagcgcgcttccctgtacgccatgttcattcagatagcgatccagctcgaccattcccgtccatcgattttcgcaccacagcggagcaagcagcgtcgggcgacgggcgctggcggaaatgcggtggtagatcacttccggtggcgtatggcgaatcatttctccggcagtgagcgtgtaatcctccagttcaataccgttcaaacgccccgcttcccaggctttcgccataatgctgcctttcacaatatgcagcggatgcagctttatgccgtccacgccggtttcaaccactcgctccagcgtttgcaaacattcagcctgcccttcgccaggcaggccgacaattaagtgggaacacaccttcagcccgcgctgacgtgccagctgggttgtacgctgataacaggcaaaatcatggccgcggttgatgcgatgcagtgttttgtcgtgggcggtttgtagccccagctccagccacacttcgtaaccctggtccttatattcgcaaagcagatccagcaccgcatccggcacgcagtccgggcgggtacccacacacaaaccgacaatattggcctggctcaccgcctgctgatacatagaacgcagcacctgaacttccgcaaaggtgctggtatacgcctgaaagtaggccagatagcgtttagcgcggttaactaaattcgcctggtgcgccagttgctcggcaatggaacgatgctgctgcgcttcatcggcaaagctggcaacattacagaatgtgcagccaccacgcccgatggtaccgtcacggttagggcagctaaaaccgccgtgcagcgtcagcttatgcaccttttgcccataacgacgggtgagatcaccaccaaacatattgactaatttctgtaactgcataatctgatagaccgcgccttgaaaagaggccaaagcctgccatttttagctcaattcggcgatgacctggatcaatcgtcccggcctgcttttatcaactgcataatcaatcaaaattaccgaaatttcatgcataatcacataaatcacttttgcttatcttgtgtcagatttttttatctcctgatggattttaggcaaaaacagtagcatgaaacgtcattaccaattaaggcagtataaaatgctggttttgtcgtcagttcaaggcaggataagggttaacacacctttatgacagtcaggaattgactgtttctctaacgacttcccttttagccttaaagataaaatccattttaatttcagtcatttaataaagaattttgcgctaaagcacatttctgtaccaataagcttgccatttgacctgtatcagctttcccgataagttggaaatccgctggaagctttctggatgagcagcctgctcatcatatttatgcagtaattgagatcccctcttcaccgtattaaccgatgcgaaaaggacaacaagggggcgaatgcgaggcgcgcgtatgacacgcaaaccccgtcgccacgctctttctgtgcccgtgcgcagcggtagcgaagtggggttcccgcagagcctgggggaggttcacgatatgttgtacgataaatcccttgagagggataactgtggtttcggcctgatcgcccacatagaaggcgaacctagccacaaggtagtgcgtactgcaatacacgcactggcccgcatgcagcaccgtggcgcgattctcgccgatggtaaaaccggcgacggttgcggcttgctgttacaaaaaccggatcgcttttttcgcatcgttgcgcaggagcgcggctggcgtttagcaaaaaactacgctgtcgggatgctcttcctgaataaagatcctgaactcgccgctgccgcacgccgcatcgttgaagaagaactgcaacgcgaaaccttgagcattgtgggctggcgtgatgtccccactaacgaaggcgtgctgggtgaaatcgccctctcctctctgccacgcattgagcaaatttttgtgaacgccccggcaggctggcgtccacgcgatatggagcgccgtctgtttatcgcccgccgccgcattgaaaagcgtctcgaagccgacaaagacttctacgtctgtagcctgagcaatctggtgaacatctataaaggtctgtgtatgccgacggatctgccgcgcttttatctggatcttgcggacctgcgtctggaaagcgccatttgcctgttccaccagcgcttctccactaacaccgtaccgcgctggccgctggcgcaaccgttccgctatctggcgcataacggtgaaatcaacaccatcaccggtaaccgccaatgggcgcgtgcgcgtacttataaattccagacaccgcttatccctgacctgcacgacgccgcaccgttcgtcaacgaaaccggctctgactccagtagcatggataacatgctggaactgctgctggcaggcgggatggatatcatccgcgccatgcgtctattagtaccacccgcctggcagaacaacccggatatggacccggaactgcgtgccttctttgactttaactccatgcatatggagccgtgggatggcccggcgggcatcgtgatgtccgacggtcgttttgccgcctgtaacctcgaccgtaacggtctgcgtccggcgcgctacgtcatcaccaaagataagctcatcacctgcgcctctgaagtcggtatctgggattaccagcctgacgaagtggtcgaaaaaggccgcgtcgggccaggcgaactgatggttatcgacacccgcagtgggcgtattctgcacagcgcagaaaccgatgacgatctgaaaagccgccatccatataaagagtggatggagaaaaacgtccgccgactggtaccgtttgaagatctgcccgatgaagaagtgggtagccgcgaactggacgacgacacgcttgccagctaccagaaacagtttaactacagcgcggaagagctggactccgtaattcgcgtactgggcgaaaacggtcaggaagcggtcggtagcatgggcgatgataccccattcgccgtgctctccagtcagccgcgcattatttacgactacttccgccagcagtttgcccaggtgactaacccgccaatcgacccgctgcgtgaagcgcatgttatgagcctcgccaccagtatcggtcgtgaaatgaacgtcttttgcgaagcagagggccaggcgcaccgtttaagctttaaaagcccgattctgctctactccgatttcaaacagctcacgacgatgaaagaggagcactaccgcgcagatacgctggatatcacctttgacgtcactaaaaccacgctcgaagcgacagtcaaagagctgtgcgacaaagccgaaaaaatggtacgtagcggcaccgtgctgctggtgctctccgaccggaatatcgctaaagatcgcctgccggttccagccccgatggcggttggcgcgatccagacccgtctggtcgatcaaagcctgcgttgcgatgccaacatcatcgtcgaaaccgccagcgcccgcgatccgcaccacttcgccgtgttgctgggcttcggcgcgacggctatttatccataccttgcctatgaaacgctgggccgcctggtagacacccatgcgattgccaaagattatcgtaccgtgatgctcaactaccgtaacggcatcaacaaaggcttgtacaaaatcatgtccaaaatgggcatctccaccatcgcctcttaccgctgcagcaaactgtttgaagcggtcggtctacacgatgatgtagtgggcctgtgcttccagggggcggtcagccgcattggtggagcaagctttgaagacttccagcaggatctgctgaatctgagcaaacgtgcctggctggcgcgtaagcccatcagccagggcggtctgctgaaatacgtccacggcggcgaataccacgcctacaacccggacgtggtgcgcacgctgcaacaagcggtacaaagcggcgagtacagcgactatcaggaatacgcgaagctggttaatgagcgtccggcaaccacgctgcgcgatctgctggcaattacgccgggtgaaaacgcggtcaacattgctgatgttgaaccggcaagcgaactgtttaaacgctttgataccgccgcgatgtctatcggcgcgttaagcccggaagcccacgaggcgctggcggaagcgatgaacagcatcggcggtaatagcaactccggtgaaggcggcgaagacccggcgcgctacggcaccaacaaagtgagccgcatcaagcaggtggcttccggtcgctttggggttactccggcgtatctggtcaatgccgacgtcattcagattaaagtcgcccagggcgcgaagccaggcgaaggcggtcagttgccgggtgataaagtcacgccttacatcgccaaactgcgctatagcgtgcccggagtgacgctgatctccccgccgccgcaccacgatatctactctatcgaggacttagcgcagctcattttcgacctcaagcaggttaacccgaaagcgatgatctccgtgaagctggtttccgaaccgggagtaggcaccatcgcgactggcgtggcaaaagcttatgcggacttgatcaccatcgcaggctatgacggcggcaccggcgcaagtccgcttagtagcgtgaaatacgcaggctgtccgtgggagctggggcttgttgaaacccagcaggcgctggttgctaacggcttgcgtcacaagatccgtttgcaggtcgatggcggcctgaaaacgggtgtcgatatcatcaaggcggcgattctcggcgcagaaagcttcggcttcggcactggcccgatggtggcgctcggctgtaaatatctacgtatttgccatctgaacaactgcgcaacgggtgtagcaactcaggatgacaaactgcgtaagaaccactatcacggcctgccattcaaggtgacgaattactttgagtttatcgcccgtgaaacccgcgagctgatggcacagcttggcgtaacacgtctggtggatctgattggtcgcaccgacctgctgaaagagctggacggtttcaccgccaaacagcagaagctggcgctgagcaagctgctggagactgccgaaccgcatccaggtaaggcactctactgcaccgaaaacaacccgccgtttgataacggcctgctgaacgcgcagttgctgcaacaggcgaaaccgtttgtcgatgagcgccagagcaaaaccttctggttcgatattcgcaacaccgaccgttctgtcggcgcgagccttagtggctatatcgcccagacgcacggcgatcaggggctggcagccgatcctatcaaagcgtacttcaacggcaccgcaggccagagcttcggcgtgtggaacgcgggcggcgtggaactgtacctgaccggtgatgccaacgactatgtcggtaaaggcatggcgggcggcttaatcgccattcgtcctccggttggttccgccttccgcagccatgaagcaagcattatcggcaacacctgcctgtatggcgcgaccggtggtcgtctgtatgccgcaggccgcgcgggtgaacgtttcggcgtgcgtaactccggtgctatcaccgtggtagaaggcattggcgacaacggttgtgaatatatgacgggtggtatcgtctgcattctgggtaaaaccggcgttaacttcggtgcgggcatgaccggcggtttcgcttacgttctcgatgaaagcggcgatttccgcaaacgcgttaacccggaactggtcgaggtcttaagcgttgacgctctggcgatccatgaagagcatctgcgtggtcttatcaccgagcatgtgcagcataccggctctcagcgcggtgaagagattctggcgaactggagtaccttcgccactaaatttgcgctggttaaaccgaagtccagtgatgtaaaagcactgctgggtcaccgtagtcgtagcgcagctgagttgcgcgtgcaggcgcagtaaggggtagcaacaatgagtcagaatgtttatcaatttatcgacctgcagcgcgttgatccgccaaagaaaccgctgaagatccgcaaaattgagtttgttgaaatttacgagccgttttccgaaggccaggccaaagcgcaggctgaccgctgcctgagctgcggcaacccatactgcgagtggaaatgcccggtacacaactacatcccgaactggctgaagctcgccaacgaggggcgtatttttgaagcggcggaactgagccaccagaccaacaccctgccggaagtttgcggacgagtctgcccgcaagaccgtctgtgcgaaggttcctgcactctgaacgatgagtttggcgcggtgaccatcggcaacattgagcgctatatcaacgataaagcgttcgagatgggctggcgtccggatatgtctggtgtgaaacagaccggtaaaaaagtggcgattatcggcgcaggcccggcaggtctggcgtgtgcggatgtcctgacgcgtaacggcgtaaaagccgttgtcttcgaccgtcatccagaaattggcgggctgctgaccttcggtattccggccttcaagctggaaaaagaggtaatgacgcgtcgccgtgaaatcttcaccggcatgggtattgaattcaaactcaataccgaagtgggccgcgacgtacagctggacgatctgctgagtgattacgatgccgtgttccttggcgtcgggacttatcagagtatgcgcggcgggctggaaaacgaagacgccgatggcgtgtacgcagcgctgccgttcctcatcgccaacaccaaacagttaatgggctttggtgaaacccgcgacgaaccgttcgtcagcatggaaggcaaacgcgtggtggtccttggcggtggcgacactgcgatggactgcgtgcgtacgtccgtgcgccagggagcgaagcacgttacctgtgcctatcgtcgtgatgaagagaacatgccgggttcccgccgcgaagtgaaaaacgcgcgggaagaaggcgtagagttcaaattcaacgtccagccgctgggtattgaagtgaacggtaacggcaaagtcagcggcgtaaaaatggtgcgtaccgaaatgggcgaaccggacgccaaaggccgtcgccgcgcggagatcgttgcaggttccgaacatatcgttccggcagatgcggtgatcatggcgtttggtttccgtccacacaacatggaatggctggcaaaacacagcgtcgagctggatagtcaaggccgcatcatcgccccggaaggcagcgacaacgccttccagaccagcaacccgaaaatctttgctggcggcgatatcgtccgtggttccgatctggtggtgaccgctattgccgaaggtcgtaaggcggcagacggtattatgaactggctggaagtttaagcgaggtaacaatgaattcgccagactgtgtctggcgaatcaaattactgacgaagtgcgcgttgttttctggcaaatgcggcatgagcgtttgacctttcctataatagggataattttcaataaattgtgctttgttcaccaagtctgatgagtgaagcacatcaagcaatttctcatttacaatccgtctcaattacttgttaacacctctgacaataccgattctgcaagctattcagtcttttcattccatgtaaattgtctcgatattaatatacaaaatatgaatataaaaaaccaatatattatccttaattatctatatattttcctatttttcagcgcaaacattcatgtaatgaataattatcaccacaaaccacctcaccagcaccttattattcacatgatcgtaactataaaattcattaaataaatacatcccagcaagttggctatttctgaacgagttatttatttacattcacaaacagatatatatactgcttcagctttttattttaaaaaataaatttgttattaaggatatgttcatatgtttttcaaaaagaacctcacaacagctgctatttgtgcagcactttctgttgcagcattcagtgccatggcaacagatagtactgatacagaattaactatcatcggcgagtatacccctggtgcatgtaccccagttgttacgggcggcggcattgttgactatgggaaacatcataacagtgcgctgaatccgaccggtaaaagtaataaactggttcaactgggccgcaaaaacagcacattaaatataacctgcacagcaccaacgctaattgctgtaacctccaaggataaccgtcagagcaccattgtagcgttaaacgacacatcctatattgaaaaagcttatgatactctcgtagatatgaagggaacgaaaaacgcctttggtttaggttctgcgcctaatggacaaaaaattggcgctgcatccattggtattgacaggtctaatggtgggattcacgcggcggacgatacaggtgaaattcctgtcgacctgattcaaactgaccactggagtgcagcgacccccacatggaaagccagttctaatggcgcattctgcagcctgacaagttgcagtgcaatcgagcgcggttattctgttgcaaaaacaggggaactgacacctgttgctattacagcggtcaccttcccgttactgattgatgctgcggtaaatgacaatactattcttggttctgatgaaacgatcaaactggatggtaacgtcactatcagcgttcagtatttataagaacttgtaatacagtttttatttttacgcattaaccagttagctataactcggacagattatgccctatgacatggtctgtcttaatcaatctcatcgcaaacagtgcataacatatattaacaatatgtttctgcgttatttatcattattacaggagttttaatttaaatgctcagacacattacattcactgtatttataacaacatcaatgaatactaacaatgccggacaggagtactatcaggcattcgttttatacgatcggttaatgtttcaggaaagctcttcgcatatcttggggaaagtaaatgtaatacgctgttcttaattgttcagtgctcaccccccagagtatagctcattccattattcaacttagctccatataaagggacagataatggaaagcctcagtgaaggaaccacagcaggctaccagcaaatccacgacggtattattcatctggtcgatagcgcccggacggaaacggtacgtagcgttaacgcgttaatgaccgcgacgtaccaggaaattggccgacgaattgtcgaatttgaacaaggtggcgaggccagggctgcgtatggtgcgcagctaatcaagcgactaagtaaggatttatgtctaaggtataagcgtgggttctctgcaaaaaacttacgccaaatgaggcttttttacctcttttttcaacatgttgaaattcaccagacaatgtctggcgaattaacaccattgggaattccgcagacaccgtctgcagaattcccaagcgcaaagatttggcagacgctgtctgccaaatctttccccttgcccaggtccacctacgtccgtttactttccgttaaaaacgctgacgcccgcagcttttatgaaaaagagacgctccgctgtggctggtctgttcgccagctagagcggcaaattgcgacccagttttatgagcggacactactgagtcatgacaaaagtgccatgctgcaacaacacgctcctgccgagacgcatattcttccgcaacaggcgatacgcgatccctttgtgctcgaatttctggaattgaaagatgaatatagtgaatccgattttgaggaggcgctgatcaaccacctgatggatttcatgctggaacttggggatgattttgcctttgttggtcggcagcgaaggttacgcattgatgacaactggtttcgtgtcgatctgctgtttttccaccgccgtttacgctgcctgctaatcgtcgatctaaaagtgggcaaattcagctatagcgatgccggacagatgaatatgtatctcaactacgccaaagagcactggacgctaccggatgaaaatccgcccatcggtctggttctctgtgcagagaaaggagccggagaagcgcattatgctctggcaggtttgcctaacaccgttctggcaagcgaatataagatgcaactacctgatgagaaacgactcgcagatgaactcgttcgaacacaggcggtgctagaggaaggctatagacgccgttaatttcagcggtttcgaattctgcagacagtgtctgcagaatctttaaaacgaactaagttttaagccattaaatcagccttaaccttcaccacaacctttttaatctctccaggctcgccgacaacgcatcctggtttatgcggttcacctggcataaacacggcgaacattcccggttttaagatgatggcttgctcgttatcaatggtgctgcaaagctgataatcatcctcatggtggaactcttcacactgacgcgcagtgcctgccatgccaaacagaatccgttcctcaccgtttaataacagctggatatcaatgtattgctcgtgcaattccgcttttttctcgacggggctttgagtgttaaacgtcatgacattcataaagatattgtcgccctgtaattcgtaacgacccggcgctttttcttgcggtctggcagctaatgccagcgttaacgcgtcctgtaacgcaggatgtaacccagcagacggtaaactctgtacttcacccatcatcataatttttctccctgggccaacagcgcagccccaagtaaacctgcatcatggcggtaatgcgccgccagtaaatcaacatgaaatgccgctggctcctgcgccagatacgtttccaccagcgccagatacccttctgccagaccaacgctgccaccgaccaccacgcactggcaatcagttgtggctttaatatcagcgatcagccttgcaagcgtacgtgcggagcggtgaatcagctgctgcgcctgctcgtcaccctgcccggcgcgcgtgaaaatagttttcgcatccgcgccagccaactccccctgcgctgccgctgcaatgccgcgaccagaagcaatcgcttccacgcaacctgtgcgtccacagccgcagactgggccgtgtggatcggcaagcgtatgcccgatatgccccgccagaccgccagggccggtaagcagtttgcagccgctcactacaccgccgccaacgccggtggaaacggtgataaagaccatatcggttatatcgccatccagcgcctgaaactccgcccatgctgcggcctgcgcgtcgttaatggcaatggtcggcaaattggtaagttgttccagcgttttgactaacggaaagtgtagcaatccaccaagattatgcggattaagcgccagcaagctgccgtcacggattatcccggtgctagcgatggcaacccgctgcgcatgagcttgcaacggagagactaatgcggataaggcatcacgcaaggcttctggtgtctggctggctggcgtaggaagttcacgacgatcgcggatctgcccgtcagcgccaatcagcgcggcggcaagtttagtaccgccgatatcaatcgccagtgtggtcatagcaccgcctttttcatcgctgtgttgtaccactgacaaatgtgctcaagacgcgtgattgcagaaccgaccgtcaccgcccacgcgccgtggcgcatcgcatccgccgcctgagcaggcgtgttgtaacgcccttcggcaatcacccgacatccggcgtcgctcaacgttttcaccagcgccagatccggctcttctggcgtttcaggcgtggtatagccagaaagcgtagtgccaataatttcggctcccagcttttggcatgccaggccgtcttccggcgtactgcagtcggtcatcgccagtaaaccgtgatggtgaatacgtgccagcagcgtttcaacaggcaccggacgcgggcggtcggtgccgtcaatggcgataatgtccgcgcccgcctgcgccagcgcatcaacatcttcaatataggccgtgatgcgtaccggagaatcctccagatcgcgtttcacaattccaataatcggcacgctcaccaccgcacgcgtggcttgcagatttgccacaccttcaatgcgaatggcaaccgcgcccgcctgttctgccgctaatgccatggcggcgacgatttcgggtttatcgagcgggctgtccggaaccggctggcaggagacaatcaggccaccgttagcagcgattttttgatccagttgtgcaagtaagctcatacatcttcccttagcgaaaggcccggtacatagaccgggcaacaggattaacttttggttttgactaaatcgtttttggcgctgccaaacggcacggcaccgctgaatggtttaccgtcgatagcgtcatgagtacgcaacgcttccgggcgcaaccaacgctgaacgcgagaaggcatatccagcccaatcagcaggatcaccacgaacgtcagactgaagctgaggcttgccagcgcagtacccagatccagacgttgagcgatcaacgcgccgatgattggggccagtgcaccgcccaatgcgccaacgttgtaggtaaagcccaggcccgctgcacgctggtcggtatcgaaataaccgccaatcagttttggtaagatcccggcgatcccttgtccaagcatttgctggaagaacagtaacagaccgagcacccagacgtttgcgccgccaatcgcaaataccggaataatcagcagctggctggccagcaggctacaaacgtacgctttgcgggttcccagccagtcaccgaggaagccacctacgcagcatcccaccgccgcgccaaagccactaaagaacagcacattggctacagtatgcgggttataagccagatcggttttcagatacgttggcagcagcgcctgaatcggccaactgtagaggaaagcaaacaacacgaccaccatcagcattacgcccgttggccagcgtttgcctgcactctgcaccataaagctgataaagattgcggcgcataacagcccaagaacagcgacgatcgcggcattttgcaggttaccggcgaagcagaaccacagcgcagtagccgccgccagtgtcattacgatattggcaatgcgatgttcaccacggtagagaatatccaccattgtgcgtactggtgctttacctgcgtgtttctctttccagtcttccgcttccgggatgtttttacgcagccagagagcaaagatgattggcaaaatgccgataaagaacagcgcacgccagccccagaccggaaccaccaggctatagacctgagcggcaacgacggcccccacagagaagccactaatcaaaaaaccactggctttgttacgcagatgttttggccagctttcaatgacataggtggcgctggaaccgtattcacccgccatccccatgccgatgaccagacgagcgataaacatggtgatgtagcctggcgcaaagccgcaggccagcgtcccggcgctgaagagaacgatgctggtgaccattgccagacgacgcccgtagcggtcacccatagcgccgagcatcaggccgccgaaccagcgagagataaaggctgcagagatcagacttgccgcctgcaccgtcgtcagcccgaattcaccttgtacttcggtgagtaccagggcgattaaaacgaaatcaaaaccgtcaagcagatatcccaaccaggcagcggaaaatgcgcgccattgtgcacggttgagatggcgataccacgggatattctgggttgtagtactcattgtgagtctcccgcggtgggcgatgcccacacgctttggtatgaaaattgtagggtacagatgcgtttatttcccctcacccggtaggggcgagcgaggggaaacaactcacccgcgctcttgcatcaactgctgggccagcgccttcagttctggcagatatttttcatctaccggtccaaacggtttgcggcacagcggcacagaaacgacatccatataatggaggacagttttcaggccgcggaatacgcccgttttgatcagtaaatcaatgactttattgcattcagtttgcagtttctgcgcggtctggatatcgccttctttcagcgccttaacgatcccctgatagcgccagcccatgatgttgtaggtactgccgataccaccatcagcgcccgccagcagaccagaggcgaagatttcgtcgtaaccgttatagagcacaagatcaggatgttcacgacggatctgctccatctgatagagatcgccagaggtctgtttcagcgcacctacgccaggcaatgtaacaagtgtgttgatctgatccagggtcagttttaccccactcagggctggaatgttgtacaccaccatcggcaaaccatccgcgctatcaataattgcccgatagtgatcgcagtgttcttcaaagctgaaaggatagtagaacggcgtgacggcggagacggcatcgaagccataacgtttagcgcttgccgcaagttgttggctttcggcggtgctgacgcaaccgacgtgggcgatgagtttaatcttacctttcgcctcttcggcgacgatttccagtacctgttcacgctcggaaaggctttgtacaaaggcctcgccggtgctaccacccacgtataaaccgtcgatgccctgctgaatattgaactgaaccaggcgacgcagactcgctttatccagtgcttgttgttggtcaaaaggagtcaggagtgcagccattacgccacgtaaattcgttgccataaatacctctgaagtgatgcttgtctgataaacgatatacctttatacctgttataccagatcaattaagcaacaccccatacagaaagcttataatgcgatctgcttcactaaagtggcattatttctttttgttggtggtctgaccgaaagcgtgccaggtagcagagacgctgttgagatggctttgcaacgcacgatcggcttcgtcaggatcatgacggcggatcgcatcaacgatcgcaatatgctgttgataactaacgttgttatgttcgtgcagtgcctgatcggtaaccgttgggcgtgcggcaataagccagtcgagcagggcaacgtggatcgccatgaagattgggttaccggggatctccgccagcacgcggtggaaatcaacgtcactacgaatgaatgccgcgttgttatccaggctctgactgttgatttccagtgcttttgccagcaaatcgatttgctcatcggtggcatgttcagccgcatagcgcaccagactggattcaaagaacagacgtaattgttcgaaatgggcaatcccaccgggatgagaaaggaaatctttcgccatgccggaaagctcaccgatgatagtgtccgcagaaggacggctgacgcgagcgcgttcgccgttgtttatttgcaccagacctttgcgttttaacgctgccagcgcttcacgcacgctaggacgcccgacgttaaagaacgccatcagttcgcgttcagacggtaattgttcaccttcgccaaattcacgacggcggatcatctgttccagctcttcttccaccatttcggagagttttttacgcgccagcgggcggctacgcaagttgcgaccaattgcaggactagaatcttcggtttggctatcaaatgcgttcataaggcccattctgtaaggtcagtgtgattaacatcatcagtgacatcctatcacaggattgaaagtaggggaaaatggcagggttttctctttgtgcctcatcattaccataattaacggaataattaactattgcgaaaaattaatgtaacgcagataaaaacatcccgtttgaattatttataagactattcacgagcattatgaatattatgaatgtgttcttacaaaataatcataagcgcatattttttaatgaaaaatcacctcacctacaattaaaaacacgacatccgcaccataaatagccttgcaaaaaatataacatcgttgttttcaatctgccgtttatgggattgaccgttttcttttgacacggagttcaacaatgttcggcataattatatctgtcatcgtattaattacgatgggctatttgatcctgaaaaactacaaacctcaggtggtgctggctgccgcaggtatcttcctgatgatgtgcggtgtctggttagggttcggtggtgtactcgatcccaccaaaagcagcggctacttgatcgtcgatatttataatgaaatcctgcgcatgctgtccaaccgcattgccggattggggctgagcattatggcggtgggcggttatgcccgctacatggagcgcataggggccagtcgcgcgatggtgagcttgttaagccgcccgttaaaactcattcgcagcccgtatattattctgagcgcaacttacgtcatcggccaaatcatggcgcagtttattaccagcgcctccggtctgggtatgttgctgatggtcaccttatttccgacgctggtgagtctgggagtaagtcgtctctctgcggtggcagttatcgcaaccacgatgtccattgagtgggggattctggaaacgaactccatttttgctgcccaggtagcgggaatgaaaattgccacatacttcttccactaccagcttccggtcgcctcttgcgtcattatcagcgtggcgatctcccactttttcgtgcaacgcgcttttgacaaaaaagataaaaatatcaatcacgaacaggcagagcaaaaagctctcgataatgtcccgccgctctattacgccattttacctgtgatgccgttaatcctgatgctcggcagcctgttcctcgcccacgtcgggctgatgcagagtgaactgcatctggtggtggtgatgttactgagtttgactgtgacgatgtttgttgagttcttccgcaagcataacttgcgcgaaacaatggacgatgtgcaggcgttttttgacggcatgggtacgcagtttgccaacgtggtaacgctggtggtcgcgggtgaaatatttgcgaaaggcttaacgacgattggcactgtcgatgcggttatcaggggggcggagcattctggtctgggcggtattggcgtgatgattattatggcgctggtcattgccatttgtgccattgtgatgggctctggcaatgcgccgtttatgagttttgccagtcttattccgaatatcgcagccggactacatgtaccagcggttgtaatgattatgccgatgcattttgccacgacgctagcgcgcgcggttagcccgattactgcggtggtggtcgttacgagtggaattgcaggcgttagcccttttgcggtggtgaagcggacagcgatccccatggcagtcggtttcgtggtgaatatgattgccacaatcacgctattttattaagtcattaaaaagacaaaacaggccgcctgggcctgttttgtattacttcacaacgcgtaatgccggtcgaccaccgcgtggtggctgcggaggttcatcgtcaggatgagtgtcatcatcgtgatctggcttgtcgccatcaataacgctcataacggtttcgttgtctgcgcttgcctcttcatcattcatgatgctggtatcttcatcgtaggcagcttcaggctcaaacatcgtgcctgcgccattttcacgggcgtagatagccagcacggcagccagcggcacagaaacctgacgcggaatgccaccaaagcgcgcgttaaagcgcacctcatcattcgccagttccagattgccgacagcacgcggcgcaatgttgagtacgatttgcccgtcacgcgcatattccataggaacctgcacgccagggagcgtcacatccaccaccaggtgcggcgtgagctggttatccagcaaccactcatagaatgcacgcagcagatagggacgacgtggtgttagctgactcaaatccatacagattaactccggcccagacgcatttcacgttctgcttcagttaaagaagcaaggaaagagtcacgctcaaagacgcgggtcatatagcctttcagctctttcgcacccgggccgctgaactcgatgcccagttgcggcagacgccacagcagcggagcaagatagcaatcgaccaggctgaactcatcgctcaggaagtacggcttctgaccgaagaccggcgcaatcgccagcagttcttcgcgcagttgcttacgtgcggcatctgcttcagaagcactaccgttgatgatggtgttcatcagcgtgtaccagtctttttcgatgcgatgcatgtacagacggctttcaccgcgagctaccgggtaaacaggcatcagtggcggatgcgggaaacgctcatccagatattccataatgatgcgagattcccacagggtcagctcacgatccaccagggtcggaacgctctgattcgggttgaggtcaatcagatcctgaggcggattgtccttttccacgtgttcgatctcgaaacttacacctttctcagccagcacaatgcggacctgatggctatagatgtcagtaggaccggaaaacagcgtcattacgctacgtttgttggcagcgacagccatgaaaacctccaggtatagtcagaatttttactgctaccagccaccaggtggccagtcagaagttgtgttacccaataaggaacgactctctttgttcgaaaatcaaacaaaaaatgagcaatacccgacatttgggcagaaaattggatgatagtttaccagattttgcgaccattgtggtgagtcgatgccggaaatggggaaaaagagatgcgctttagtctgaaatagttgacttagtcccttattggcgatgtggtttttgttttacctgtctgtcaggtggcagcaaaaagcaactttccagtttttacgctgattcagattttagctataaaaaaacccgccgaagcgggttttttcgaaaattgttttctgccggagcagaagccaattaacgtttggagaactgcggacgacgacgtgctttacgcagaccgactttcttacgttcaacctgacgagcgtcacgagtaacgaagccagctttacgcagttcagaacgcagggactcgtcgtattccatcagagcgcgggtgataccgtgacggatcgcaccagcctgaccagagataccaccacctttaacggtgatgtacaggtccagtttctcaaccatgtcgaccagttccagcggctgacgaactaccatgcgggcagtttcacgaccgaagtactgttccagagaacgttggttgattacgattttaccgttgcccggtttgatgaaaacgcgagctgcggaacttttgcggcgaccagtgccgtagtattgattttcagccattgcctataatcccgattagatgtcaagaacttgcggttgctgtgccgcgtggttgtgctcgttacccgcgtaaactttcagtttacggaacatagcacgacccagcgggccttttggcaacatgcctttaaccgcgatttcaatcacacgctcaggacggcgagcaatcatctcttcaaaggtcgcttgtttgataccaccgatgtggccggtgtggtgatagtacactttgtcagtacgcttgttgccggttacagcaactttgtcagcgttcagaacgatgatgtaatcaccggtatctacgtgcggagtgtattccgctttgtgcttaccgcgcaggcgacgagccagttcagtagccagacggcccagagttttaccggtcgcgtcaacaacataccagtcgcgttttacggtttctggtttagctgtaaaagttttcattaaaagcttacccaataaatagttacacgttggtgaacacccaaacgtcttcaattgttgaggttcacacgacaaagtccggcaaacctaccccttcgaatagcctatgccagcacacaaaaagttttgggaaaaaaactttcttgtaacgtggggtcgcaggattatagagaagtcggggtcaaagatcgacccctttttgtgatttgtgacaggttttaacccgccaaatgctcgcgcttcagatactcttcgctttgcatctcttgcagacgactcaggcaacgctggaactcaaacttcagccgatcgccctgataaatttcatacagcggcacttctgcactcaccactaatttgacatggcgctcgtaaaactcatccaccagcgcaataaagcgccgcgcttcgctctccatcaaccgcgtcataactggtacatcaaacaacatgaccgtatgaaagagacgactgagcgcaatatagtcatgctgactgcgggcgtcgacgcacagcgtagtaaaagagaccgccagcgtctggttctcgacgcccattgttgctaatggccgatggttgatttctaacgtcggactattttctcgtttcccccccgccagcgccaaccatagtttatccatttgcgcccgggtttcatcgtgaagtgggctaagccacagatgcgcctgagtgagtgtacgcagacgataatcaacaccagcgtccacgttcattacatcacaatgctgtttaatggcatcgattgcaggcagaaaacgcgcacgttgcaggccatttcgataaagttcatccggcggaatattactcgtcgctaccagggtaataccgcgagcgaacagggctttcatcagaccgccaagtagcatggcatcggtaatatcagaaacaaaaaattcgtcaaaacagagcacgtcagtttcggctttaaagcgatcggcaataatttccagcggatcggtctgcccctgtaaggcagttagctcttcatgcacccgcagcataaaacggtgaaagtgcaggcgctgtttccgctctcccggcaggctttgatagaaaaggtccatcagccaggttttcccgcgtcctacaccgccccacatatataagccacgcactggcgtatgctttgtgtcttcgcgtttaccccacagcttaccgacccgcgccattagcccactcgtcctgggggctggtggcgtgctattgatgagttcctgataaataatttccaggcggctgacggcctctttttgaacgtcgtcgggttgatggctgccttcattaagcgccttcaggtattggcttgttggggtaacgctttgcatgatcttattgttattccttgaataatcggtgcgccgttgttcacggttgacgaaaaaaaggccgttctacactacgcgatatgcagtcgggattccacttctgtggaattaacggttatagtggcataatcagccgcaggcatggagcctgaagccaacaccctacggaaacaaaagacaacgggagatgttcatgacctgggaatatgcgctaattgggttagtcgtcggcatcattattggtgctgtggccatgcgttttggtaatcgtaaactacgccagcaacaggcgttgcagtacgaactggaaaagaataaagctgaactggacgagtatcgcgaagagctggttagccactttgcccgcagcgcggaattactggataccatggcgcacgactatcgccagctgtatcagcacatggcaaaaagctccagcagcctgctgccggaactgtctgctgaagcaaacccgttccgtaatcgtctggcagagtctgaagccagcaacgatcaggcaccggtgcagatgcctcgcgactattctgaaggcgcatccggcctgctgcgtactggcgcgaagcgcgactaatttatttttcgggcgcagccattgcgccctcctcttctctccctccccgactatcatttaatctggtgtctcattgttagccgtctgaaaattcaataacatcaaactgttttgaatctcttttcttatcattcaggtacgagagcaggaataatgaaaaaacaaacccagctgttgagtgcattagcgttaagtgtcgggttaactctcagcgcgagttttcaggccgtcgcgagcattccaggccaggttgccgatcaggcccctctccccagtctggctccaatgctggaaaaagtgcttccggcagtggtgagcgtacgggtggaaggaacggccagtcagggacagaaaatcccggaagaattcaaaaagttttttggtgatgatttaccggatcaacctgcacaacccttcgaaggtttaggctccggtgtcatcatcaacgccagtaaaggctatgtgctgaccaacaaccatgtgattaatcaggcacagaaaatcagtattcagctcaatgatgggcgcgagtttgatgcaaaactgattggtagcgatgaccagagcgatatcgccctgttacaaattcaaaacccgagcaaattaacgcaaatcgctattgccgactccgataaattgcgcgtcggtgattttgccgtagcggtcggtaacccatttggccttgggcaaaccgccacctctggcattgtttccgcattaggccgcagcgggttgaatcttgaaggtctggaaaactttatccagacagatgcttccattaaccgcggtaactccggcggtgcactattaaaccttaacggtgagttaattggcatcaacactgcaatccttgcgcctggcggcgggagcgtcgggattggatttgccatccccagtaatatggcgcgaacactggcgcagcagcttatcgactttggtgaaatcaaacgcggtttgttaggcatcaaaggcaccgagatgagtgccgatatcgccaaagccttcaaccttgacgtgcagcgtggcgcgtttgtcagcgaagtgttgccaggttctggcagcgcaaaagcgggcgtcaaagcgggcgatattattaccagcctcaacggcaaaccgctgaatagctttgctgagttgcgctctcgtatcgcgaccaccgagccgggcacgaaagtgaagcttggcctgctgcgtaacggcaaaccactggaagtagaagtgacgctcgataccagcacctctagcagcgccagcgctgaaatgatcacgccagcgctggaaggtgcaacgttgagcgatggtcagctaaaagatggcggcaaaggtattaaaatcgatgaagttgtcaaaggaagcccagctgctcaggctggcttgcaaaaagacgatgtgatcattggcgtcaaccgcgatcgggtgaacagcattgctgaaatgcgtaaagtgctggcggcaaaaccggccatcatcgccctgcaaattgtacgcggcaatgaaagcatctatctgctgatgcgttaatgtcgtaaaccgggcatcaggcttacgtgtgatgtccggttaactcgtggtatgctgctgccgttcccttttttaatgacgcctccatcatgtttgtgaagctcttacgttccgttgcgattggattaattgtcggcgctattctgctggttgccatgcctagcctgcgcagccttaacccgctttccactccgcaatttgacagtaccgatgagacgcctgccagctataatctggcggttcgccgcgccgcgccagcggtggttaacgtttacaaccgtggtttgaacaccaactctcacaaccagcttgagatccgcaccctgggatccggtgtaatcatggatcaacgcggttatatcatcaccaataaacacgtcatcaacgacgccgatcagatcatcgtcgccttacaggatggacgtgtatttgaagcattgctggtgggatctgactctctaaccgatctggcggtacttaaaattaatgccactggcggtttacctaccattccaattaatgcacgtcgcgtaccgcacattggcgacgtagtactggcgatcggtaacccgtacaacctcgggcagaccattacccaggggattattagtgccacgggtcgaatcggtctgaacccgaccgggcggcaaaacttcctccaaaccgatgcttccattaaccacggtaactctggcggcgcgctggtgaacagcctgggcgaactgatgggcattaatacgctgagctttgataagagtaacgatggcgaaacgccggaaggtatcggctttgcgattcctttccagttagcaaccaaaattatggataagctgatccgcgatggtcgcgtgatccgcggctacattggtatcggcggacgtgagatcgcaccactgcacgcgcagggcggtggtatagatcaactgcaagggatcgtggttaatgaagtgagtcctgacggcccggcggcgaatgcgggtattcaggtcaacgatctgattattagcgtggataacaaaccggccatctctgctctggagacgatggatcaggtggcggaaattcgccctggtagcgtgatccctgtagtagtgatgcgtgatgataagcagttaacgctgcaggtcaccattcaggaatatccggcaaccaattaagtcgtgcgctcaaaacaaaaaaccggagtctgtgctccggttttttattatccgctaatcaattacttattaacgaactcttcgcccagggcgatatctttcttcagcgtatccagcataccttccagcgcgttctgttcaaatgcgctcagggtaccgatagatttacgctcttccacgccgtttttacccagcagcagcggttgagagaagaaacgggcgtactgaccgtcgccttcaacgtaggcacattcgacaacgccttgttcgccctgcagtgcacgaaccagagacagaccaaaacgtgcagctgcctggcccatagacagggttgcagacccgccaccggccttcgcttcaaccacttcagtacccgcgttctggatgcgtttggtcagatcagccacttcctgctcggtaaaactaacgccaggaacctgactcagcagcggcagaatggtaacaccagagtgaccgccaataaccggcacttcaacttcgcctggctgtttgcctttcagttccgcaacaaaggtgttggaacgaatgatatccagcgtggtaacgccgaacagtttgtttttgtcataaacaccggcttttttcagcacttcagcagcaattgcaactgtggtgttaaccgggttagtgataataccaatgcacgctttcgggcaggttttcgcaacttgctgtaccaggtttttcacgatgccggcgttaacgttaaacaggtcggaacgatccatacccggtttacgcgctacgcctgcagagataagaacgacatctgcgccttccagcgccggagtcgcatcttcaccagaaaaacctttgattttcacagcagtagggatatggctcagatcgacagccacaccgggagtcactggagcgatatcatacagagagagttcactaccactaggcagttgggtttttaacagtagtgcaagcgcctggccaataccgccagcagcgccgaggactgcgactttcatcctaaactccttattatattgataaactaagatatgttgctccgctgccgcgaccttaatccacaaaattgccgtttacaatgaccacatctcaagaatgtgtagtcacgcaagtttagcgtttatgcatttaattgccgtaatcaggaacctaacttacgtaattaacagtcgcttatgcattagcgcaacattccaacaggtggtgacaatataccctaccgttcagccaaaacaacatcaatttgataacaattaatttacttttaagcagaatttgcatgccgtgacgcaggcatgtttctcaataacgaaatttgataaaatcccgctctttcataacattatttcagccttcttcagggctgactgtttgcataaaaattcatctgtatgcacaataatgttgtatcaaccaccatatcgggtgacttatgcgaagcagcgctaagcaagaagaactagttaaagcatttaaagcattacttaaagaagagaaatttagctcccagggcgaaatcgtcgccgcgttgcaggagcaaggctttgacaatattaatcagtctaaagtcagccggatgttgaccaagtttggtgctgtacgtacacgcaatgccaaaatggaaatggtttactgcctgccagctgaactgggtgtaccaaccacctccagtccattgaagaatctggtgctggatatcgactacaacgatgcagttgtcgtgattcataccagccctggcgcggcgcagttaattgctcgcctgctggacagtctgggcaaagcagaaggtattctgggcaccatcgctggcgatgacaccatctttaccacccctgctaacggtttcacagtcaaagacctgtacgaagcgattttagagctgttcgaccaggagctttaatctctgccccgtcgtttctgacggcggggaaaatgttgcttatccctctcaaccccctgctttcccctgcgattaatttaacgaatagtgcgttttactgcgacatgtcattcacacaatgaatacataaggtaaaaaaagcacattatgcaaaattcattatctaattgaaaaaactagaattaacgataaataaccgtatttttaattcttttttgttattaaaattcacatttttaacacttagtatcaactgaaacagttagcgcggtattaattagctcaataattagtgtatacttgattttgtgatatgggtcacgaaacaaaggcccagctaaaagattatgtcgaggtaaaaatcatgaaaatcaaaaccactgttgctgcattaagcgtactttctgttctctctttcggtgcattcgctgccgactccattgatgctgcacaagcacaaaatcgtgaagcaatcgggaccgtatccgtaagtggtgtggcgtctagcccaatggatatgcgtgaaatgctgaacaaaaaagcggaagagaaaggcgcaacggcctaccagattactgaagctcgtagcggtgacacctggcacgctacggctgaactgtacaaataaaccctcatcgtcttgtccgacgatattgcccccggttcgggggcttttttttgcgttaatgacgaacattaaaacgcaaatgcccttccagctcttcctctgcctcatcaaacagcaatattaacgcgccaaaacggcgacgcgttttctctcccagatgaacaaattcaatctcaagtggtagcggcaggacatcgttcattaacacatcccatagactgtcgagatcgcgtaccttatctttcgccagaccaaaggtttggctaaagtcacgataaaaatcctcctgactctcaatctcatcaaaatcaaaggtataaatattcatctgttgccaccgtcacgtttcgcggcgagttctgccgtgcatcgctaagtatagccatgaaaaaaccgacgcttttggcgtcggttttgacttaactatcggtcaacgcatgttgatacttatggagcatccccgccagccgatttaccggttccgtcacctgcggtggcgcttgccagatgcgtagcttttcctggtagatttccagttcttccagcaactggccaaagtaccgacgacgtttatcatcgctacgggcagatatcacatggtctgctgtgcggcgcatttgtcggtgaaacgcgcttaaatcctcgttaaccgggatcggtgcatcacgcaggcgctggtgcgcgataatcatcgtcagcgccaggcgaaatttcggcaaatcccctgggaacttattcatcagcaaaaacagctgctgataaagtgccgggaggtggttctctttacgacgtgccacattggtagtcatcgcggaaacagcggcagaaacaaactgattaagcagtacacgtccggtcctgtcgcggcttttatcccgcaccagcaaaataacggtgaacgcgagcacacagccgacgatttgccctaatgcgctgtcgagaaactgactgaaatggaaagtcatcgggttatccagcacgataatatttatggtgctggccagtgcccccatgctgcccagtcgccgtttctgtacttctataccgaggaagaatcccagcactgccaggctaatgcacagcagcaacatgctctgttgggtattagggataatcaccaaaaagtagagcagccctaacggcagcgcggccagcgtcccgtagataaagtcgatcgccaccatgcgtggattcggcaaacgcattgccagactcgtcactaccgcaatcatcaccattgcaccactgccggaagtccagcccgtccacagccagaaaagcgtgcccagaatgcaggaaagtgtggttcgccagaagttacccattgcatgatgacgttcggcactctctacttttacttccggttcgccttgcaggatctcttcttcggtggcgttgatttttgtgttactgataacgccgcgcttgagaagctgataacgcgttgccgccgcgacccagctataaatggtgacaggcgtttcccgttccccggtccaggcgataactctccgcaggcgtttgagctgcttgtggacgtcctgcgcggtttctaccggcgtgtcaaaaaattcgcggaaagtatcagtgatcaattccgggcgcgtattctgaataagataagtttcgcaggattgggtaatcagcgtcaggcttagcgtattgatcgcttttaaacgtcgattggcccgcgcccagcgggaagattccatattcaggttgctgcgcatgccttgtagcgccgtggtgcgtcgcaccaggtcgccccaggctttatcgacaacttcaccatcgccatgcttgatacagagttgcattaattgatattgcgcgaccagcaaactttccagctctcgatccacttcttgtttgatgcttcgcggagaaaagagcaaatccgccataatcgcacacacaataccgataacgatctcgctacaacgttcgacggcaaactgcggcgtaagcaatggttccggctgaatggtgatcacaatgatcagcgcggtataaccggccagcccccacgcatagctgttttctattcgtaccaggctggatatccaggtacaaaaaccggcccagatacagcacaccagaatcatcaataatggtgcgcggatcatcgcaatgatgatcaccagtccggcaatacagccaataaatgtgccgatgatgcgcaaaaagccacgatagcgaatagcgccagaatacggttcacctcccgcagcaaaggccgtaccggcggcaacaatcgccgctgtcagtaccgcccagcgtggcgtttccagctggaagtgaaagccaacaaacagcgccagtacaatggcggtcgccagttttaccgcaaagcgaatatgttggttagcaatggagaaaatacccatcgtgattaaccaaactcacgcaggcgatgggccattttacggaagaagctatcctggctttcgtcgcgatcttgtttgccagtgaccaccactgtagcagtggtgcccgcaggccagatgttctcttgctggttgtcgagacgaatacgaaccggaacacgttgcgcaagacgcacccattcaaggttagagtctatagtcgccatccctttgtcgtcacgcgtgctgctggcgttggtgacccctgcggcaacactatcaacagtccctttcagcactttgttactgccaagcggcgtgatctctgcacgataccccggacgcaccccttccagcttagtttcttccatataggccagtacatagaaggagttctgtttcaccagcgcaaccgccgtacttcctcgagtaataaactcaccggtatagacgttgaggttggtcacccagccatctgctggcgcgcggatcaccgtgcgttcaagatccagttttgccagatcgcgggtcgcctgcgctttcgctaactgatgcagaaccgtttgtagtacgttgttggcctggtcgatctcttcgcgagacatcgcctgcacaccgagacggttacgacgtccggcctcctggcgtttctcctgtgccagtacctgataataagcaacatcggcttgcgcttcctcaagcgccttttgatagcgcggctggtcgatggtgaacagtatctgtccttttttcaccagctggttatcatgaacattcacctgggtaatgagtccagaaacgtccggcgcgatcgcaacgacgtcagcgctaaagcgcgcgtcacgcgtccagggggattcggtgtaatagacccaggcattaaaaattgcgatgaaggccagaatgactaatacgaccgtgatggccgtacgggagaattttcttattagtgttttcacttcaacctcaaacgaacagtcggcttatcaaataaaacaagcagcaatagagcgcggtgttgaacaacgccggatgccagacaaagtcgtagatacctgttggcacaagtacccggcgcaccagccagaaaatcgccagacttaaaagcaattcaaaaaatatcggtgggaaggacagcccaaacaccacgataacgggaaacagactcatgttgaccttggttgtaaagagagagcaggcgttattattttcagcatctgtcgccgcagagaagggcatggaaagccgggcgagagcaacattgctgtagattgatatttaatatattagcgtaactgttatgctgttatctatattatgtgatctaaatcacttttaagtcagagtgaataatggaacgactaaaacgcatgagcgtgtttgccaaagtagttgaatttggctcttttaccgccgccgccagacagctacagatgagcgttagctccatcagtcagacggtaagtaaactggaagatgagttgcaggtaaagctgttaaaccgtagcacacgcagcattggcctgaccgaagccggtagaatttactaccagggctgccgtcgtatgcttcatgaagtgcaggatgttcatgagcaactgtatgccttcaataacacccccatcgggacgctacgcattggctgttctagtactatggcacaaaatgttctcgccgggctgacagccaaaatgctgaaagaatacccaggtttgagcgtcaatctggttaccggaattccagcccccgacctgattgccgacggtctggatgtggtgatccgcgtcggcgcgttgcaggattccagcctgttttcccgccgtctgggcgcgatgccaatggtggtgtgcgccgcgaaaagctatctcacacaatacggcataccggaaaaacccgccgatttgagtagtcatagttggcttgaatacagcgtgcggcccgacaatgaatttgaactgatcgcaccggaagggatcagcactcgcctgatcccacaaggaagatttgtgactaatgatccgatgacgctggtgcgctggctgacggcgggtgccgggatcgcctacgtgccgctgatgtgggtgatcaacgagatcaatcgtggggagctggagatcctgctgccgcgttaccagagtgatccacgcccggtttatgcgttatataccgaaaaagataagctgccgctgaaggtacaggtcgtgatcaacagcctgacggattattttgttgaggtcggtaaattgtttcaggagatgcacgggcgcgggaaagagaagtaattcatattgtactgttacgttgtacaaacctgtgccaacgggttcccctcaccctaaccctcaccccaaaggggcgaggggaccgttcgtgcacgtagaaagattaattatccttctgaaaatagtgaaattattacgcagtaccgccaacagtcaggttatcgactttcaacgttggctggcccacgccaaccggcaaactttgcccttctttaccgcagacacccacgccgttatccagtttcaggtcgttgccaaccatgctaatctgctgcatggtttcgataccggaaccaatcaacgttgcgcctttcaccggcttcgttactttaccgttttcaatcagatatgcttcactagtggagaaaacgaatttgccggaggtgatatccacctgaccgccaccaaagttcggtgcatagataccgtactcaacggattcaataatttcctgcggggtgcttttacccggcagcatataggtgttggtcatacgcggcatgggcagatgggcgtaggattcacggcgaccgttgccagtcggcgtcatccccatcaaacgcgcgttgagtttatcctgcatgtagcctttcagaatgccgttctcaatcagcacgttgtactggcctggcgtaccttcgtcatcaatcgccacgctacctcggcgatcgaccatcgtgccatcatcaaccacggtacacagttcactagccaccagctccccgacctgtccactaaatacactagtgccacggcggttgaagtcgccttccagaccgtgaccaaccgcttcatgcaacagcacgcccggccaacctgcgccaagtactaccggcatggtgcccgctggtgcagcaacggcagaaagattgaccagcgccatacgcactgcttcttttgcccatgcatccgcacggacttcgccgtcgagatcggcaaggaagaattcataaccaaaacgaccgccgccgccactggcaccgcgttcgcgtttgccatcttcttcgacgagaacgctcacggaaagacgcaccagcggacggacatccgccgctagcgtgccgtcggtggccgcaaccaaaattaattcatagacaccactgaggctggcagtcacttcctgtacgcgcttgtccgcttcgcgggcaaccttatcgacgcgacgcaggatatccagcttctcttcacggctcatgctttgcagcggatctacgctggtatacaacgggctatgctctaccgcgcccagcgtctgtactttaccatcaccactatcacggacgatggtgcgcgccgcttgcgcactctgttccagcgccagcaggctgatttggtcagcgtaagcaaatccggttttttcaccgctgattgcacgcacaccaacgccctgatcgatgttgtaagaaccatctttaataatgcggtcttctaaaacccaggattcgtgatagctgctctgaaaatagagatcgccataatcaaggcgacgttcggccagttgaccgaggatcgcgaacaagtcctgatgtttcaggccgttcgccgctagcaattgttcacttaccaggttaagactcatcgtttttgctactcgttagttactgcagtagaggattttttacggctgccggatgcggcgtgaacgccctatccagcctacggttatgttccggtttgtaggcctgataagacgcacagcgtcgcatcaggcaacggctgtcggatgcggcgtaaacgccttatccgacctacggttatgttccgtttgtaggcctgataagacgcacagcgtcgcatcaggcaacggctgccggatgcggcgtaaacgccttatccgacctacggttatgttccgtttgtaggcctgataagacgcacagcgtcgcatcaggcaacggctgccggatgcggcgtgaacgccctatccgacctacggttatgttctggctcgttggcctttggcaacgattatcctatgagattggggcaattacgcgccctcgtcaaatcattgcgctttttctttacgcggttggcgcaacacttcgttgatttgcggatcgtccagcggaccgctaatgtgatagcgcaaaatggagactttgctccacagcggccccagcactttactggcggcaaacactgccgcgccaacaatggggttaaccgcaaaagccgcagccacgcccaccgtcgcagaaatctctggtgcgacaaccgcttccatattcaggtcgcgacgtaccagatttacgctccctttcatggcgatatccgcctccaggccatccaccagcgtgtcgtcggtgtgcataacgccgtctttaatccacgcggtgctgcgaatggagtcaaaatagaacccttcgccaaaagtgtctctgaaatcaaaacgcagcttacgcatcagggcatctacgctcaataagcgcagcaattgcccggcatgtccggtattgatttcggtaatttcgcctttacccagttgagtatgaatgatgccattcaacgtcgcttcatctggctgccagggtgctttgcgccagtgtaaatcgtaatccacattaaaactgctctggcgtatgggcgtcgtgacaccaaaaaattctgcggcggcatcaattttctgcccgcgcagttttcctttcaggctggtacgttcattccccggattattaacccattcaccatcggcagtaagccggctgaaaccagtatcaatcagtccattggtcagcgttaacgtatcgccagaaatggtgatatcactgtcaatgcgaccgaatttttgcccccagaaccagcactctgtgcatcgtatttgggcgtccggccagccacggaagttaatgcgctccgttgtcgggaaaggactactcggcgtactatcaccacgagttttcgccacgctcgggttgtaataaagatatttgatattcgccagccacggcgcgttattacgcatcgctagcgtggcgttgatttcacgcccttgcgcttcaaccagggtgccatttgccgtcggttggctaacaatactcaggttattccattgctgatttcccagactcaacataggcgtacgtaacgttatgtgttgtgggaaactcgctgcaccaccgacactctccgcagcgcctttctggaacagggccagccactcggcaccattcatcggcggcatattgagttcaacgccactttgttccggcaacggcgggagcgttttactgtctgccgcccaaatagcacgatcgagcgtcagcttttgaccgagcaaccagcggctattgaaatgattatccgcaccagcctgtccggttaattcaaagctgttgagattgccatcaaccttaacgtttaccgctagtggttcacccgcaggtttggctaacggactaggtaagtgactgctcacattctttagatcgccgttcagctctatgttataggtcgcaccagcatgataaggcagatcaatgcccactttaccatcccacgccacgctgccactcaatgcttcgttcaccgcttcaggcagaacgccggttttcgccggttgccagttaccgttgaggtttaccgctacctggtaggcttttgccccttctttggtggaaaaatccacgttcaacggctgattaaaccagcttgctgtcagtggttcactttgcagatcgctattgataaagctgaatttaccgctcaaatttttcagggtgctgtcgagtggtttgataaacagactgttattacgcagcgtcacttcacctttcgcggttaccagttcgccgttcagcgggatatcaagatgtaagcgagcattcacatcgccgtcgagctggagttcttgcagggtcgcacccagagaatctttcagcggtgtctcatcaaagtaagggccaacggctttacccggacctttaatgtcagcgtcaatcagcagtttttctttactgtagtcagggatcactgcggtaagattactcgcgcgcacgccgcccagattaacgccatcggttttcatccataaaccgtcgttaataaagtccagttcaatatcaaggttagttaatgcaggccagtccggctggaaggcaaacttcgcgttgcgcagcggcaccagcacttcaaactgaccttcgttgtgtttataggggaagagttgcggattgccaccataaaccagcgtcgcgttatccgcttcaccgccctgaatcgcgccacttaagtaatcaaccaggtctttacccatcaagttttccgggaaatagcgccaggcttgactaccatcatcggtactgatgccagccagaatacccagccagggttcatcgttagcaggttgcaggtaacgaaaaccgccgcgcgcatggacggctttggctttaacgtcaatattacgcccatccagctggaaacctttgttattgttcagccagcttatagttgcctggccgtcggcgatttctagtggcgcacggaataccgtttcgtaaggcatctttgcctgcttcatgctcgcggtaagcaaaccattttcaacgctgccggaaagcgtcccggagaagtgttccgcacccggtaataatttccattgcttccaggccagatcgctccagcttgcctgaaaacgggtcttgtctgccgcctgaagcgggatatccagcgccagagtgttaatcttgccgctcggttgtgtggagcgccaaacatcacccagtgcaggactaagtttcgcggccagcgggcgtatgccctccaggcctgccagctccagattactggcgcgaatccggagttcgtcactgcgtttattgtctttgccgccaacgtcctgttccggtatccaggccagcgtcaatgctccgctcggccagggtttgccgtccatcgtgatccgtgtatcgggaatagagaactgccagcccggattttcacgcgtaatatgcgcggtcagattatccacgctcagcgtatgcgtttgcttctcgcccaaccagctggcaccgccctgtttcagccagacgtcaccgccggttacatcgcctttgtcgatcgtcatccagccttcaagggagaactgtgccgtttccagcgcaatattgtcctgcatccatttaccgagccacggcttcaggtcgatgtcatccgcctggagccagacgcgaccattgcttaacaacccctcatcatcgcgcaaatccatgcgcacctgcatcacgccgtgctgtccggtaaggctggagaggcttaccaggccttccgcacggtgtcgacgtggatcgttcagccaggtgagttgtgggatcgccagctcggcgcgctgaccggatggcgtcaggaaactgacttcactgtcgcgaagatcgaaatggtcaaattgacgaagaaacagatcgctgatgtgactggcttccagactgtcatcactaccaccgctggtgataggagtgttggtgcgaaagcgcagctgccagaaagtgaggtcgcgaaactgccagcgcatatgtaacaggctctgccagacatccagcgccagagtaacgcgtttaacgctaaattcgccgccatcttttagttctgcacggatgtcgtgtgcttcaagcgtcgggccaaaattctgccagctggcactgagctgactggcttctaccggcatgccagtcgcggattctattttgttgaggatttccggacgccaggcgtcaagatgcggtaaagcaatacgcaggccgctaaccagcagggcagcgatcacaacgagcgcggctccagtaagcagtaaaatccccggcaatcgcctcacccgtcactccttgtctgctaaaaatgtgactcaaaaaccctttgccggatggcggcccagcatctgtttacatcattacgacgtcaaactgctcctggttatagagcggttcaatttgtactttaacctgtttgccaacgaaaatttccacttccgccaggctgtgactctcttcgcctttcaaggcttcagctactgccggagaagcatagaccaggaaacggtcggagtcgtaagcatggtggacacgaacaatctcgcgcatgatttcatagcataccgtttccacggttttcaccgttccgcgaccgtggcaggttgggcattcgttacacagtacgtgctcaatgctttcgcgggtgcgtttacgcgtcatctccaccagccccagcgcgctaaaaccattaacgctggttttcacccggtctttgctcaacgcctgctccaggctgtgcagcactcggcggcggtgatcttcattattcatatcgatgaaatcaataatgataatcccgcccagattacgcaaccgtaactggcgagcgatagcctgcgtcgcttcaatattggtattgaaaatggtgtcgtccagattgcgatgaccgacaaacgctccggtattgatgtccacggtggtcatcgcttcggtctggtcgataatgagataaccaccggatttcagttctactttgcgttccagcgctcgctggatttcgttttcgacatcaaagagatcgaaaatcggctggcgtcctgtgtaatgctccagcttgcttgtcatctcgggaatgtactcgctggtgaactcaagtaacgcttcgtaagtcaggcgactgtcaacgcgaatgcggtccagttcggcatcggcgaaatcacgcagaacacgctgcgccagcgccagttcgccgtacagctgataacgggtctgcgggcgttttttacgctccataactttggtccagacgcgtttcagataagcggcatcggaggccagttcagcctcgccaaccccttccgctgcggtacggatgataaacccgccctgctcgtcgcaatactctgcgaccacttttttcaggcgttcacgttcactttcgctttcaatacgttgggaaaccccaacgtgagaagcccctggcataaacaccagatagcgagaagggagcgtgatatcggtggtcaggcgcgcacctttagtgccaagcggatctttcaccacctgcaccatcagatcttgcccctgacgaaccagttcgctgatgtcgcgcaccgtgaattgcttttgttcttcacccgccacacattcggtgtgcggcatgatgtcggatgcatgaagaaacgcggctttatccagcccaatatctacaaaagccgcctgcatacccggaagtacacgacttacacgacccttgtagatattgcctactattccgcgtcgcgcctcacgttcaatatgaatttcctgcagaataccgccatcaatatacgccactcgcgtttcgctaggcgttacgtttactaacaattcagccgtcatgtttatcccttttctcacgcagtgcgttaaaattacttaataattcatacgtttcaaccagcggtaagccgactacggcgtgatagctgccatttatcttcctgacaaaacagccacccagcccctgaataccgtatgcacctgctttatctaacggttcatcgctggcgacatagcccgcgatgtcttcgtctgttaacgttctgaaagtcacatcggtgaccaccaggcaatcgagaatgtgctggctgtcggccaacgccactgctgtcatcacctgatgggtctgaccgcttaatttgcgcaacatctgcgccgcatgctctgcgtcgcgcggtttctccagcacttctccgttcaggataacgatagtatccgcacccagcaccgggagatccttcgccgtttgcgcgacacctgcccgtgctttctcgcgcgccagacgcacaacatactgctgcgcgctctcctgcggctgacgctgctcctcaatgcccgtaacaatacgttcaaaggtcacgccaagttgcgcaagtaactcctgacgacgcggagaaccggaagctaaatacagagaagtcatagaaacctttattgcactgcaaactgctgacggactttgcgcatcagcaagaaaatccacggccagagcaccccattgactacactactccagaacacttccggtctgaaagagacgttaatcactaaaaactctgcccagaaaacaataatatccaccaccaggctaagcaacatgacgaccagcgcctgctgccataatgcgaggttgcggaaaagctggtatttcagcgccaccaggtaagcaatgatgctcatcgccaatacgcgtacgccaagcgtgctgccgctgatcagatccagtatggcacccatcacaaaacctgtgcccacatttacgcgatgaggcaaggccaggatccaatacaacaagatgagtaacacccagtttggccggaaaacaatcaggttatccggccagggcatgatttgcagcaacagcgcaatgaggaaagagagccagattacccagcgtccctggctacgatagctcgccactattgccctcccggcgcacgttattgccctcccggcgcacgcgcaggcggttgagcaccactttgcggcggcgtagccctttgtggagagcgattagcagcaggctgtgtcggcgcagcaggcgcagtagctgcatttcctgtcgccggttgctgcggagtcggctgagcgatccccgttgccggttcaggtaactttggccccatcgcgtctgggctaggcaatacctgcggcatcatctgcatcagacgttcattagcaacacgatgcacctcttccggcgtcatcgggttagcgccgttacgatctgccccccacagcagcagcagataacgcaaacgttgcagccctgcagtcggacgcgcctgaatcacagtataagcgcgctgggtatcgagttttacggaagagacaaccgcgaccggatagccttccgggaaacgaccgcccagaccggaagtcaccagcacatcaccaacacgaatatccgtattcgccggcagatgctcaagctgcaaatcatccgtacaaccgttaccggctgcaattacgcggatatcgttgcgcagcacctggattggcagcgcgtgggtcgcatcacaaatcagcagcacgcgactggtcagtttagcgacggccaccacctgaccaacaacacctttgtcgctgatgaccggctggccttcataaacgccattaacgctacctttatcgataacaacttgatcgctataaggatcgttaaccgtggagataacctgagtcaccattttctgctcatcctgacgcagcggggaacccagcagctcgcgcagacgcgcgttctcctgtttgtattgtccaagcatcagcagttcactgtttttcagcaacagttcctgacgtaacgcccggttttcaagttctaattggtcacggctggccagcgtctggcttacgccatccagcaattcacgaggagcattggaaacaaagtagaaaggactgacggcggtatccatataagtacggatttgactgaacgtccccaggcggctgtcggcaataataatgccgagcgccaccagcaccgccagaataaggcgaatctgtaggctcgggccacggctaaaaattggcttcataagttatgcgtattctcgtatcagaccaggcagggtaaacagacacttcccctgcctgcatccgattactcttcgctgaacaggtcgccgccgtgcatgtcgatcatttccagcgctttgccgccaccgcgcgccacacaggtcagcgggtcttcagcaacaacgactggaatgccggtttcttccattaacaaacggtcaaggttacgcagcagtgcgccaccaccggtgagcaccatgccgcgctcggagatgtcggaagccagttccggcgggcactgttccagtgcaaccattaccgcgctcacaataccggtcagcggttcctgcagtgcttcgaggatttcattggagttcagggtaaaaccgcgtggaacaccttctgccaggttacggccacgaacttcgatttcacggacttcatcgcccggataagcgctaccgatttcgtgcttgatacgttctgcggtggcttcaccgatcagagaaccgtaattacgacgcacatagttgatgatagcttcgtcgaaacggtcaccaccaatgcgcacagaagaggagtaaaccacaccgttcaaggagataacagcaacttcagtggtaccaccaccgatatcaaccaccatagaaccggtcgcttcagaaaccggcaggccagcaccaattgcggcagccatcggttcttcaatcaggaagacttcacgggcaccagcgccctgcgcggattcacgaattgcgcggcgttcaacctgggtcgcgccaaccggcacacaaaccagaacgcgcgggcttggacgcataaagctgttgctgtgcacttgtttgatgaagtgctggagcattttttcagtcacgaagaagtcggcgataacgccgtctttcattgggcgaatggcagcaatattgcccggcgtacggcccagcatctgcttcgcgtcatgacctactgcagctacgcttttcggactaccggcacgatcctgacgaatggccaccacggaaggctcattcaatacgatgccttgtccttttacataaatgagggtattcgcagtacccaggtcaatggacaagtcattggaaaacatgccacgaaattttttcaacatactaagggataatcctgaaagctggggcggaaaagaaaatccgcttactttaccaaccacacgcagcagcgacaaggcgcaaaaatcatctgctacggtgaaaattagtgcagttcgtttcctttgttacaaatctctgcctgagtccagaaaggcttaatgcatcagcagcattcctcgcctgtttgcaaccgcgtaaggtcattcatctgcatatgtgctgcaacaatctggcgagcagacaagcacactcccatgagacgcagcgcgcattattctacgtgaaaacggattaaacggcaggttaaacgctgtatctttgactatattttttcacgttagtatcaagtggctgactggacgcgaaaaaatccccttgcccgcctgtaacaccgcgctgaatcagggtctgccactcgcttcggctacgcacgccggtggcgtaaacctgggtgctggtcccggagcaggcttccaccaggctttgaaccagcagctggttctccgttcgcttctcaatgtttctgaccagccccggatggagcttgagtaactcaacattaagttctttgatccaactggtacttaccagcgtcaaaccagcctggttgacggctacccgtacccctaaagcattcactaaacgaataacaggttgtaaacgactgatatgttgacctacatcggcctctgcaagttcaataattatgcgttttcgttgacttttttcacattgcattaacgtatcgcgcagccaacgctgaaaacgcgggcgaatcaggctctcaacggtaacctgaatcgccagattttcctctggccagtaacgcaatagtggaataagacggctgatttgcagacggtcatactcttcgcttaagccaaactgcaagaccatcggcatatgctccgcgctgctaacctcttcattaccatcgaagatgcggcacatgagttcgcgatgatgaacctgaccttcgcgagtaaccgccggtttttgataaaggcgcgggccgccgcgactgagcatttgctcgataagcgtacgccagcgaacattaccgcgtcctttttcaggcaagctgtcatcgtaaatagcccagctattgccgccctgcaatcccgcattacgcgtggcagactctgcatgttccattacctgctcggtatcctgaccactacgccaggcgcagataccaatgtggatcatatcgtcgcgatcgagcattttattgttcggcaaggtatcaacggctttgattaactgaccggcgatgctctctgcctcttttaacgtccggtgcggtaacagcgcagcaaaatcactgcggtggtaacgcgccagcagtgcgccagggtagcgcatcataaatgtgctcagcagattcgtcagagtgaagaactgttcttcaacctggctgtgcccccaggtatcgctcaacatattgaaatccggcagacgaatcatcatcacgatcccgtgggtacctactttctcctgatcttccagtaacgttgctaactgattatcgaaaaagagtcggttattgaggccggttttcacgtcctgggcggcataagagcggatcagcgtatcaagacggctgtgttgttcgcgtgcgttctgaatttcacgaagcagcgtatccagcgcactgctggttctgggcggccattcatagatggttcccaacacattagagccacgctcaccgtttaagatacgagtagcccgggtttccagcaattcttgcccggcaagttgccgttgtaaccagcgtaccgccaggaagagcataacaatgataaagccaatcgcccccgtgagcggcgcggtggtcatcaagctatggaaatagttgcccatcggatcctgataaaccagacgcaagctcatccccggatgctttatcaacggaacgctcagttcgcgaaacagatcgctggagccaactggacgataactaccatttctggccagggtataaacctgtttatcaccatggagcaggtctacacgaacgatatctgcgctcatcattaattcggtaatttgtggccttaatacgctgaagtcattgctcacaaggtgggtatcaatcgccgtcgccaccgcctgaacgcgatgactaaacttatactgaatggcgttgtagaaacttaggctacagcccagcaaagtcacaaaaattgttaacccggtgagcagcgtaacaaaggcgctaaatttcgtcgttaatctcatccttgtgttaactccgatagtgaggaagcgggcatactagcaaatcagatttatctcgcaatttattgcgcttcatcggctttgcttttccattagcgagtatagtcttcagaaattattttccaatccatcatgcacatgaggaccacttatgcaggcgttacttttagaacagcaggacggcaaaactctcgcaagtgtacagactctggacgaaagtcgcctgccggagggcgatgtcacggtcgatgttcactggagcagcctgaactataaagatgcgctggcgattaccggtaagggaaaaatcatccgtaattttccgatgattcctgggatcgattttgccggaactgtacgcaccagcgaagatccgcgttttcatgccggtcaggaggtgttactcactggctggggcgttggtgaaaaccactggggtgggctggcggagcaggcgcgagtgaaaggtgactggctggttgccatgccgcaagggctggacgcgcgtaaagcaatgattatcggtactgccggttttaccgccatgctgtgtgtgatggcgctggaagatgccggtgttcgcccgcaggacggggagattgtcgtgacgggtgccagtggtggcgtcggcagtaccgccgtggcgctgctgcataagttgggttatcaggtcgttgccgtttccggtcgcgaaagtacccatgaatatctgaaaagtttaggtgctagccgtgttctccctcgtgatgagtttgccgaatcccgtcctctggaaaaacaagtctgggctggggcaattgacaccgttggcgacaaagtgctggcaaaagtgctggcgcaaatgaattacggcggctgcgtggcggcctgtggtctggcgggtggttttactctgccaaccacggtcatgccatttattctgcgtaatgtccgtttgcaaggggtggatagtgtaatgacgccaccagaacgccgcgcacaagcctggcagcgactggtcgccgatttaccggaaagtttctatacccaggcggcaaaagagatatctctgagtgaggcaccgaactttgccgaggccatcattaataaccagatccagggtcgcacgctggtgaaggttaactaaccatttagcagggaataataagagagggaactcattttgaaatcattattcaatcggttaacgggaaaagcggttagccggacagctttcgtcgaacaccttggtcaggaagttatacaacatcatccaaactggaaagtcatgatttcgactgaccacaaattgatgcgcattgatactccactaaacagctattattgatacgcctccgtcgcctgttaggtttatgttgctttgcctgggcgacgctacgcttagccccttacttatttctggtaccatggggtgaataatctgattttgtttgactacaaattaatcactcgaacctatttaatgctgagcattgtcaatcggttaattttgcgtgctttagcattcacatctatccagacgatgcagtgaaaattgggtaatccccagcaaccgctgcgtaatgtcgtctatcttgtcgcgatcctggcatccctacattatttgtggtctgtgaagattatctcattgcagcccctcatcttcgcagggctggcttttcagcttttcaccttacgttataagaagttccgtcgatgatggcgctaatttcgtgaattgtgcggcttgttgcaaattacacggtgttgaaggttatttacatgttagctgttgattatcttccctgataagaccagtatttagctgccaattgctacgaaatcgttataatgtgcgacctcgtcctccctgacgcagtttttgcgctgcggaaaaggtgacattggcgcaacgaaggtatattttgttttttgccggaggatagcagcagatcgctgcacaatgtccgtcaagtctaacattgacactctggggcaaaatagaccggcgtcccggcctgctggaatttatcgctatgcatacagctgtcggggcatacgctttacagacggcggtgaaacgcctgtcacaatcacactaaacaaagagtacggaacccactcatggatattcgtaagattaaaaaactgatcgagctggttgaagaaagtggcatctccgaactggaaatttctgaaggcgaagagagtgtacgcattagccgtgcagctcctgccgcaagtttccctgtgatgcaacaagcttacgctgcaccaatgatgcagcagccagctcaatctaacgcagccgctccggcgaccgttccttccatggaagcgccagcagcagcggaaatcagtggtcacatcgtacgttccccgatggttggtactttctaccgcaccccaagcccggacgcaaaagcgttcatcgaagtgggtcagaaagtcaacgtgggcgataccctgtgcatcgttgaagccatgaaaatgatgaaccagatcgaagcggacaaatccggtaccgtgaaagcaattctggtcgaaagtggacaaccggtagaatttgacgagccgctggtcgtcatcgagtaacgaggcgaacatgctggataaaattgttattgccaaccgcggcgagattgcattgcgtattcttcgtgcctgtaaagaactgggcatcaagactgtcgctgtgcactccagcgcggatcgcgatctaaaacacgtattactggcagatgaaacggtctgtattggccctgctccgagtgtaaaaagttatctgaacatcccggcaatcatcagcgccgctgaaatcaccggcgcagtagcaatccatccgggttacggcttcctctccgagaacgccaactttgccgagcaggttgaacgctccggctttatcttcattggcccgaaagcagaaaccattcgcctgatgggcgacaaagtatccgcaatcgcggcgatgaaaaaagcgggcgtcccttgcgtaccgggttctgacggcccgctgggcgacgatatggataaaaaccgtgccattgctaaacgcattggttatccggtgattatcaaagcctccggcggcggcggcggtcgcggtatgcgcgtagtgcgcggcgacgctgaactggcacaatccatctccatgacccgtgcggaagcgaaagctgctttcagcaacgatatggtttacatggagaaatacctggaaaatcctcgccacgtcgagattcaggtactggctgacggtcagggcaacgctatctatctggcggaacgtgactgctccatgcaacgccgccaccagaaagtggtcgaagaagcgccagcaccgggcattaccccggaactgcgtcgctacatcggcgaacgttgcgctaaagcgtgtgttgatatcggctatcgcggtgcaggtactttcgagttcctgttcgaaaacggcgagttctatttcatcgaaatgaacacccgtattcaggtagaacacccggttacagaaatgatcaccggcgttgacctgatcaaagaacagctgcgtatcgctgccggtcaaccgctgagcatcaagcaagaagaagttcacgttcgcggccatgcggtggaatgtcgtatcaacgccgaagatccgaacaccttcctgccaagtccgggcaaaatcacccgtttccacgcacctggcggttttggcgtacgttgggagtctcatatctacgcgggctacaccgtaccgccgtactatgacagtatgatcggtaagctgatttgctacggtgaaaaccgtgacgtggcgattgcccgcatgaagaatgcgctgcaggagctgatcatcgacggtatcaaaaccaacgttgatctgcagatccgcatcatgaatgacgagaacttccagcatggtggcactaacatccactatctggagaaaaaactcggtcttcaggaaaaataagactgctaaagcgtcaaaaggccggattttccggccttttttattactggggatcgacaacccccataaggtacaatccccgctttcttcacccatcagggacaaaaaatggacactcgttttgttcaggcccataaagaggcgcgctgggcgctggggctgacccttttgtatctggcagtttggttagtagccgcttacttatctggcgttgcccccggttttaccggctttccgcgctggtttgagatggcctgcatcctgacgccgctgctgtttattggactgtgctgggcgatggtgaaatttatctatcgcgatatcccactggaggatgacgatgcagcttgaagtaattctaccgctggtcgcctatctggtggtggtgttcggtatcagcgtttatgcgatgcgtaaacggagcaccggcaccttccttaatgagtatttcctcggcagccgctctatgggcggtattgtgctggcgatgacgctcaccgcgacctatatcagtgccagtagctttatcggcgggccaggagctgcttataaatacgggctgggctgggtattgctggcgatgattcagcttcctgcagtctggcttagtctcggtattctcggcaagaagtttgcgattcttgcgcgccgctacaatgcagtgacgctgaacgatatgctgtttgcccgctaccagagtcgtcttctggtgtggctggcgagtttgagtttgctggttgcgttcgttggtgcgatgaccgtgcagtttatcggcggtgcgcgcctgctggaaaccgcggcgggtattccttatgaaaccgggctgctgatttttggtatcagcattgcgttatataccgcctttggtggctttcgcgccagcgtgctgaacgacaccatgcaagggcttgtgatgctgattggcaccgttgtgctgcttattggcgtagtacatgccgctggcggcttaagtaacgcagtacagaccttgcaaaccatcgatccgcaactggttacgccacaaggcgctgacgatattctgagccctgcctttatgacgagcttctgggtactggtgtgttttggcgtgattggcctgccgcatactgcggtgcgctgtatctcttataaagacagcaaagccgtacatcgggggatcatcatcggtacgattgtggtcgcaattctgatgttcggtatgcacctggccggagcgttaggtcgggcggtgatccccgatctcaccgtaccggacctggtgatcccaacgttaatggtaaaagtgctgccaccgtttgctgccgggatcttcctggctgcaccgatggctgcgatcatgagcacaattaacgcccaactgctgcaaagttccgctacgatcattaaagatctctatctgaatatccgtccggatcaaatgcaaaacgagacgcgtctgaagcggatgagcgcggtaattacgttagttctcggcgcgttgctgctgcttgccgcctggaagccgccagaaatgatcatctggctgaatttgttggccttcggtgggctggaagccgttttcctgtggccgctggtgctgggtctttactgggaacgcgccaacgccaaaggcgcgctaagtgcgatgatcgttggcggcgtgctgtatgccgtactcgcgacgctgaatattcagtacctgggcttccaccctatcgtgcccagcttactactaagtttgctggctttcctggtcggaaaccgtttcggtacatccgtcccgcaagctaccgttttgactactgataaataaagagttttgccatgccttggatccaactgaaactgaacaccaccggcgcgaacgcggaagatcttagcgatgcgctgatggaagcgggtgccgtttctatcacttttcaggatacccacgatacgccagtatttgaaccgctgccgggcgaaacgcgcctgtggggcgacaccgatgtgattggtctgttcgacgctgaaaccgatatgaacgacgtggtggcgattctggaaaaccatccgctgctcggcgcaggcttcgcgcataaaatcgaacaactagaagataaagactgggagcgcgaatggatggataatttccacccgatgcgctttggtgaacgactgtggatctgccctagctggcgtgatgtgccggacgaaaacgccgtcaacgtgatgttagatccagggctggcgtttggtacgggtacccatccaaccacctctctgtgcctgcaatggctcgacagcctcgatttaaccggtaaaacagtcatcgactttggctgtggttccggcattctggcgatcgcggcgctgaaactgggtgcagcaaaagccattggtattgatatcgatccgcaggcgattcaggccagccgcgataacgccgaacgtaatggcgtttctgaccgtctggaactctacttaccgaaagatcagccagaagaaatgaaagccgacgtggtggtcgctaacatccttgcaggcccattacgtgaactggcaccgttaatcagcgtcctgccggttagtggcggtttgctgggcctttccggtattctggcaagccaggcagagagcgtttgtgaagcttatgccgatagcttcgcactggacccggtcgtggaaaaagaagagtggtgccgtattaccggtcgtaagaattaaccttcgcatcgccgtagggtgacgcggggcgaagtgcgagcaagctcacaaaaggcacgtaaatttgccgattatttacgcaaatttgcgtgccaaaattttcattcataaagaaaaattgagaacttactcaaatttctttgagtgtaaattttagtcactattttctaatatgatgatttttatgagtaattatcgcaccacgctcattttaaatgcaattctttgatccatctcagaggattggtcaaagtttggcctttcatctcgtgcaaaaaatgcgtaatatacgccgccttgcagtcacagtatggtcatttcttaactcatgcgcatcggacaatatcagctcagaaatcgcctgatcgcagcgcccatggctggcattacagacagaccttttcggacgttgtgctacgagatgggagccggattgacagtatccgagatgatgtcttctaacccacaggtttgggaaagcgacaaatctcgtttacggatggtgcacattgatgaacccggtattcgcaccgtgcaaattgctggtagcgatccgaaagaaatggcagatgcagcacgtattaacgtggaaagcggtgcccagattattgatatcaatatgggttgcccggctaaaaaagtgaatcgcaagctcgcaggtagtgccctcttgcagtacccggatgtcgttaaaagcatccttaccgaggtcgtcaatgcagtggacgttcctgttaccctgaagattcgcaccggctgggcaccggaacaccgtaactgcgaagagattgcccaactggctgaagactgtggcattcaggctctgaccattcatggccgtacacgcgcctgtttgttcaatggagaagctgagtacgacagtattcgggcagttaagcagaaagtttccattccggttatcgcgaatggcgacattactgacccgcttaaagccagagctgtgctcgactatacaggggcggatgccctgatgataggccgcgcagctcagggaagaccctggatctttcgggaaatccagcattatctggacactggggagttgctgcccccgctgcctttggcagaggttaagcgcttgctttgcgcgcacgttcgggaactgcatgacttttatggtccggcaaaagggtaccgaattgcacgtaaacacgtttcctggtatctccaggaacacgctccaaatgaccagtttcggcgcacattcaacgccattgaggatgccagcgaacagctggaggcgttggaggcatacttcgaaaattttgcgtaaacagaaataaagagctgacagaactatgttcgaacaacgcgtaaattctgacgtactgaccgtttctaccgttaactctcaggatcaggtaacccaaaaacccctgcgtgacagcgttaaacaggcactgaagaactattttgctcaactgaatggtcaggatgtgaatgacctctatgagctggtactggctgaagtagaacagcccctgttggacatggtgatgcaatacacccgtggtaaccagacccgtgctgcgctgatgatgggcatcaaccgtggtacgctgcgtaaaaaattgaaaaaatacggcatgaactaattcaggttagctaaatgcttgattaaaaaggcgctactcggcatggggaagcgccttttttataggtgtcacaaagggagtgaccatgagaacaggatgtgaaccgacccggtttggtaatgaagctaagaccattattcacggtgatgcgcttgccgaacttaaaaagatccccgccgaaagtgtcgatctgatctttgccgacccaccatataacatcggtaaaaattttgatggtctgatcgaagcctggaaagaagatctgtttatcgactggctgtttgaagtgattgcagagtgccaccgcgttctgaaaaagcagggcagcatgtacatcatgaacagtacggaaaacatgccctttatcgatctccagtgccgcaagctttttaccatcaaaagtcgcatcgtctggagttatgacagttctggagtgcaggcgaaaaaacactacggctccatgtacgaacccatcctgatgatggtgaaagacgcaaagaactacacattcaacggtgatgctattctggtagaagccaaaaccggaagccagcgcgcgttgatcgattatcgcaaaaatcctccacagccttacaatcatcaaaaagtaccgggtaacgtttgggattttccgcgcgtgcgttatttgatggatgaatatgaaaaccacccgacgcaaaaaccggaagccttactgaaacgcattattctcgcctcttccaacccaggcgatatcgttctcgacccgtttgctggtagctttactaccggtgccgtagccatcgccagcggacgaaaattcattggtattgagatcaacagcgagtacatcaaaatggggcttcgacggctggatgtcgcgagccattactctgcggaagaactggcgaaagtgaaaaaaagaaagaccggcaacctgagtaaacgaagccggttaagcgaagttgaccccgatctcattacaaagtaaaggatgtgtaagcctggttttcagattattcatttcgtgtatatttcctgccagacttggttaaacatgcacaggctcaggtaatgattcgcaagtattggtggctcgtcgttttcgctgtcttcgtttttctgtttgatactttactgatgcagtggattgaactgctggcaacagaaacagacaaatgccgcaatatgaacagtgttaatccactaaaactggttaactgtgacgaactgaattttcaggacagaatgtgaatttacatgacacttaattcattcgtttgatgaattaatttcgttatgttttcatctggcatgaacattcttaatacgttatcgaccagagcgggggcttgtttataaagatcataacccgccatattcattaaccagttttgaacaattccgctgaaggcaccatcaataataatcatcacaacatctaaatcgaggttatttgctacacaaccttgttgctgacacgcctgcaatacttcgcggagagtctgcggattaaagcccatcttttcgcgtatcactccctcggccagcatctcatcattaaattcacatttgtgatataagattttcagcaacgcctgctggcggggaattttggcaatatattgcaagccgacaatcaatttttcacgcaattgttgaaacgggtcatgctctaatccagccgtcaagtgttcctggattaactcccgcaaactaggctgttgcaaccacatctcattaaacagttgagtcttgttttcgaagtgccagtagatagcgccacgcgtaacgttagcggcgtcggcaatgtcgttgagcgtcgtcttgcttacgccatgctgcgcaaactgggcgatggcagtttcaatcagttcttgccgggtcttcagagcttcggctttggttctttttgccatgattaattattcaggaaataaatatattcgacacagagtgagaaaatagcgaaggttaatctatcacctaatgtgtatttatacgagaggctaatattgagttgctataaatcgttaaataaataatatatattatttacctaagatacattcactacatcaatatatatttcaatttacgaggttttaattctgcctctttcaacccgcgtcaaaataaaacagtagaatattaatctttttttgtgtttatgtgccttgagatgcctgtattcataactattccttacatcgacgaatgataatttgtaggatagcgaactgtatttttctttctgcgagttaacgcgttgcctttttgggtaaataacgcgcttttggttttttgaggaatagtaatgacgaaacatgccaggtttttcctcctgccctcctttattctgatctccgcggctttaatcgccggttgtaacgataagggagaagagaaagctcacgtcggtgaaccgcaggttaccgttcatattgtaaaaacggccccgttagaagttaagactgaattaccaggccgcaccaatgcttatcgtatagccgaagttcgcccacaggttagcgggatcgtactgaatcgcaatttcactgaaggcagcgatgtgcaagcaggccagtccctgtaccagatcgatcccgcgacctatcaggcaaattatgacagcgcgaaaggcgaactggcgaaaagtgaagccgccgccgccatcgcgcatttgacggtaaaacgttacgttccgctcgtgggtacgaaatacatcagccagcaggagtacgaccaggccattgctgatgctcgtcaggccgatgccgccgtgattgccgcaaaagccacagtcgaaagcgctcgcatcaatcttgcttataccaaagtcactgcgccaattagcggacgtatcggcaaaagcactgtgaccgaaggcgctcttgtcactaatgggcaaacgactgaactggcgactgtccagcagctcgatcctatctacgttgatgtgacccaatccagcaacgattttatgaggctgaagcaatccgtagagcaaggaaatttgcataaggaaaacgccaccagcaacgtagagttggtcatggaaaacggtcaaacctatcccctgaaaggtacgctgcaattctccgatgtgaccgttgatgaaagcaccggctccataaccctacgtgctgtcttccctaacccgcaacatacgcttttgccgggtatgtttgtgcgtgcacggattgatgaaggcgtccaacctgacgccattcttatcccgcaacaaggcgttagccgcacaccgcgtggtgatgcaaccgtgctgattgttaacgataaaagtcaggttgaagcgcgccctgtcgttgccagtcaggcgattggcgataaatggttgattagtgaaggactgaaatctggcgatcaagtcattgtcagcggcctgcaaaaagcgcgtccgggagagcaggttaaagccactaccgatacccccgcagatactgcaagcaagtaaggtaatctgacatggcaaacttttttattcgacgaccgatatttgcatgggtgctggccattattctgatgatggcgggcgcactggcgatcctacaattgcccgtcgctcagtatccaacaattgcaccgcctgcggtttctgttagtgcaaactatccgggcgctgatgcgcagaccgtgcaggatacggtgacgcaggttatcgaacagaatatgaacggtatcgataacctgatgtatatgtcctccaccagcgattccgccggtagcgtgacaattacccttaccttccagtccgggaccgatcctgatatcgcgcaagtgcaggtgcagaacaaactccagctcgccacgccgttgctgccgcaggaggttcagcagcaggggatcagtgttgaaaagtccagtagcagctatttgatggtggcgggctttgtctctgataacccaggcaccacacaggacgatatcagcgactatgtggcctctaacgttaaagatacgcttagccgtctgaatggcgtcggtgacgtacagcttttcggcgcacagtatgcgatgcgtatctggctggatgccgatctgctaaacaaatataaactgacaccggttgatgtgattaaccagttgaaggtacagaacgatcagatcgctgccggacagttgggcggaacgccagcgttaccagggcaacaattgaacgccagcattattgctcagacgcggtttaaaaatccggaagaattcggcaaagtgaccctgcgcgtaaacagtgacggcagcgtggtacgcctgaaagatgtcgcacgggttgaacttggcggtgaaaactataacgttatcgctcgtatcaacggaaaaccggcggcgggcctggggattaagctggcaaccggcgcgaatgctctcgataccgcgaaagccattaaggcaaaactggcggaattacagccattcttcccgcagggaatgaaggttctctacccttatgacaccacgccattcgtccagctttctattcacgaagtggtaaaaacgctgttcgaagccattatgctggtgttcctggtgatgtatctgttcttgcagaatatgcgagcaacgctgatccccgccattgcggtacccgtggtgttgttagggacgtttgccatcctcgccgcttttggttactccatcaacacactaacgatgttcgggatggtgcttgccatcgggctgctcgtcgatgatgcgatagtggtggtggagaacgtcgagcgcgtgatgatggaggataagctcccgccaaaagaagcgacggaaaaaagcatgagccaaattcagggcgcactggtgggtatcgcgatggtgctgagtgcggtatttattccgatggcattcttcggcggttctactggggcaatttatcgccagttctctatcaccatcgttagcgcaatggcgctttctgttctggtggcattgattcttacccctgcgttatgtgcaacgctgcttaaacccgtctctgctgagcatcacgaaaataagggcggtttcttcggttggtttaataccaccttcgatcatagcgttaaccactacaccaacagcgtcggcaaaatcctcggatccacaggacgatatttactgatctatgcgctgattgttgcaggaatggtggtgttgtttttacgtcttccgtcttccttcttacctgaagaggatcagggtgtctttctgaccatgattcagttacccgctggcgcgacgcaagagcggacgcaaaaagtgttggatcaagttacggattactatctgaagaacgagaaagcgaacgttgaaagtgtctttacggttaacggctttagcttcagcggccaggcacaaaacgccggtatggccttcgtcagtctgaaaccgtgggaagagcgtaatggtgacgaaaacagtgcggaagcggtaatccatcgtgccaaaatggaattgggcaagatccgcgacggttttgtcattccattcaatatgccagccattgttgaactgggcacggcaacgggtttcgactttgagttaattgatcaggctgggctgggtcacgatgccctaacccaggcccgtaaccagttgcttggtatggcggcgcaacatcctgccagcttagtcagcgtgcgccctaatggcctggaagacaccgcgcagtttaaactggaagttgaccaggaaaaggcgcaggcattaggtgttagtctttctgacatcaatcagaccattagtacggcgctgggtgggacttacgttaacgacttcatcgaccgtggccgcgtgaaaaagttgtatgttcaggcggatgccaaattccgtatgctgccagaagatgtcgataaactttatgtccgcagcgccaacggcgaaatggtgccattcagcgcctttaccactagtcattgggtgtatggctctccgcgactggaacgctacaacggtctgccgagtatggagattcagggggaagccgcgccaggaaccagttccggcgatgccatggcgttgatggaaaaccttgcgagtaaattacctgcgggcattggttatgactggacgggtatgagctatcaggaacgcttaagcggaaaccaggctcccgctctggtagcaatttcctttgtggttgttttcctgtgccttgctgcactctatgaaagctggagtattcctgtcagcgttatgttggtagtgccgttagggattgtcggcgtgctgctggcggcgacactctttaatcaaaaaaatgacgtctactttatggtgggcttgctaacgacaattggcttgagcgccaaaaacgctattttgatcgttgagttcgctaaagatctcatggagaaagagggtaaaggtgttgttgaagcgacactgatggcagtacgtatgcgtctgcgtcctatcctgatgacctctctcgcctttattctcggcgtattaccgctagctatcagtaacggtgccggcagtggcgcgcagaacgctgtgggtatcggggtaatgggaggaatggtctctgcaacgttgctggcaatcttcttcgtaccggtgttctttgtggtgatccgccgttgctttaaaggataaatcagaaacataaaggcgctttcgggtgcctttattatttccagtgaaacccataaaaattaataagatattcttctgctcactctttaaaagctttctatagttcccgctcccttcactatttttacaattcacataatttgtcattattcattccgcaagatttataacctccggtgataaaatggcattcagctcgttaataagagagttaacttattaagcgttagcgtttattactgaggtaacaccatgaaaagattaattcctgtggcattgctcaccgcattgctggcgggctgtgctcacgatagcccctgcgttccggtttatgacgatcagggtcgtctggttcacaccaatacctgtatgaaaggcacgactcaggataactgggaaacggctggggctattgccggcggggcagctgctgttgctggcctgacgatggggatcatcgctctaagcaaataactgaacagggcgcggagttccgcgctctttttaacgatacagtatctctccataagataaaatattgctatattctgctgggtaattccctgctgatttagcatgttacatcgcgttatttcgctgctttcgaaataacgcatcaatttaattttcacacttcccaccagaaatatactcacgctaacaatcattattctgcttagtaaaacacgcgtaaatattttgcgccaaaatgtggcgcatgtttcattttcgcaccattgcggggcgctgtttttattatttcctgtctacactcagcttattgcgacgcgaaatcgtgcgcaaaagctggcactacttttgcttataagaggatggccacagacaggtaaaagacgtttcccaaacgtcctataacgataattttcgcctcacaggaagcattatgaaaaagatgatgatagccacactggctgccgccagcgtgctgcttgccgttgcaaatcaggcgctgctggcgcgacgcttgatgccgttcagaaaaaaggttttgtgcaatgcgggatcagtgatggattacctgggttctcttatgccgatgctgacggtaagtttagtggtattgatgttgatatttgtcgtggtgttgccgctgctgtatttggtgacgacacgaaagtgaaatataccccgctcactgcaaaagaacgcttcaccgctttacagagtggggaggtggatttgctctcccgtaatacgacctggactagttctcgcgatgccgggatgggaatggcatttaccggcgtcacttattacgacggcattggcttcctgacgcacgataaagcggggctaaaaagcgcgaaagaactggatggcgctaccgtctgtattcaggcgggtactgataccgaactcaacgtcgccgactacttcaaggcaaacaatatgaagtacacaccggtgactttcgatcgctctgacgaaagtgcgaaggcactggaatctggtcgctgcgatacgctggccagcgatcaaagtcaactgtatgccctgcgcatcaaattaagcaacccagctgaatggattgtcttaccggaagttatcagtaaagaaccgcttggtccggtagttcgtcgtggcgatgatgaatggttcagcattgtacgctggacgcttttcgccatgctgaatgctgaagagatgggcatcaattcccagaacgtcgatgaaaaagcggctaatccagcaacgcctgatatggcacatctgctgggtaaagaaggcgattacggcaaggatctgaagctggataataaatgggcctataacatcatcaaacaggtgggtaactacagcgaaatttttgagcgtaacgtaggtagtgaaagcccgctgaaaattaaacgtgggcaaaataatctctggaataacggcggtattcagtacgcaccgcccgtgcgttaagtcggtgtgaggtaacgagcgtcgctacggcggcgctctcttcagcgttatgctttccgaggtttctatgtctcatcgccgcagtaccgttaaaggcagtctctcttttgccaaccctacggttcgcgcctggttattccagatccttgccgttgttgctgttgtcggcattgttggttggttatttcacaacactgtaacgaatctcaataatcgtggcattactagtggttttgcctttctggatcgcggcgctggcttcggtattgtccagcatttgatcgattaccagcagggcgacacctacggacgcgtttttattgtcggcttactcaatacgctactggtttctgcattgtgtattgtgttcgcttctgttttgggcttctttatcggtctggcgagacttagcgataactggctgctacgaaagctttccacaatttatattgagatcttccgtaatattcccccgctgctgcaaatcttcttctggtactttgccgtgttgcgcaatttgcccggaccacgccaggctgtgagcgcgtttgatctggcctttttgagcaatcgtgggctttatattccgagtccgcagctgggagacggatttattgcgtttatcctggctgttgttatggctatagtcctttctgttgggctattccgctttaataaaacataccagataaagaccggacaactgcgccgcacctggccgatcgccgcagtgttgatcattggtttgcctttactggcgcaatggctttttggcgcagcactacactgggatgtcccagccctacgaggctttaacttccgcggcgggatggttttaattcctgaactggcagccttaacgctggcacttagcgtttatacatctgcatttatcgccgagattatccgcgctgggatccaggcagtgccttatggtcaacatgaagcggctcggagtctgggattacccaacccggttacgctacgccaggtcattattccccaggcattgcgggtgattattccaccgttaaccagccagtatctcaacatcgtcaaaaactcctctcttgccgccgctattggctatcccgatatggttagcctgtttgccggcaccgtgctgaatcagacggggcaagccatcgagacgatagccatgaccatgagcgtctatctgattatcagcctgactatcagcctgctgatgaatatctataaccgccgcatcgcgatcgttgaacgctaaggagtcatgatgacaaaagtattgctgtctcatcccccgcgcccggcgagccataacagtagccgcgcgatggtgtgggtgcgaaaaaatctgttctccagctggagcaatagcctgctgactattggctgcatatggttgatgtgggaactgatcccaccgttgctgaactgggcatttttgcaggctaactgggttggcagtacgcgtgccgactgcacaaaagccggtgcctgttgggtcttcatccacgaacgatttggtcagtttatgtatgggctttacccacacgaccaacgctggcgaattaacctcgcattactgattgggcttgtgagcatcgcaccaatgttctggaaaatactcccgcatcgcggtcgctatattgcggcctgggcggtgatttacccactgattgtctggtggctgatgtatggcggtttttttgctcttgagcgggttgaaacccggcaatggggcgggctgacgctaactttaattattgcaagtgttgggattgcgggggcgctaccgtgggggatcttactggcgttaggtcgccgctcccatatgccgattgtgcgtatcttaagcgtcatttttatcgaattctggcgcggcgtgccgctgattaccgttctgtttatgtctagcgtcatgctgccgttgtttatggcagaaggcaccagtatcgacaaattgatccgcgcgctggttggcgtgatcctgtttcagagtgcatatgttgcggaagtcgtgcgaggtggattacaggcgctgcctaaagggcaatatgaagcggcagagagcctggcgttgggttactggaaaactcaggggctggttattctgccacaggcgttgaagctggtaattcctgggctggtaaataccatcatcgcactcttcaaagataccagcctggtgatcattatcgggttgttcgatcttttcagtagcgttcagcaggcaaccgttgatcccgcctggttgggtatgagcacggaagggtatgttttcgccgcgctgatctactggatcttctgtttcagcatgagccgctatagccagtatctggaaaaacgttttaacaccgggcgtacaccgcattgaggacactatgagccaaattttactgcaacctgctaacgcgatgattacgctggaaaacgtcaataaatggtatggacaattccatgttttgaaaaatataaatttaaccgtgcaaccgggagaacggatcgttctgtgtggccctagtggttccggtaaaagcacaaccattcgttgtattaatcatctggaagaacatcaacagggacggatcgtggtagatggcatcgaacttaatgaagatatccgcaatattgagcgcgtcaggcaggaagtgggaatggtctttcagcatttcaatctcttccctcatctgaccgttttacagaactgtaccctggcaccgatttgggtacgcaagatgcctaagaaagaggctgaagatctggcggtgcattacctagagcgggtgagaattgccgaacatgcgcataagtttcccggacagattagtggtggtcagcagcaacgcgttgccattgcgcgtagcctgtgtatgaagccgaaaattatgttgtttgatgagccaacgagcgcgctcgatcctgagatggtgaaagaggtgctggatacgatgattgggctggcgcagagcggtatgacaatgttgtgtgtaacacatgagatggggtttgcacgaaccgtcgctgaccgggtaatttttatggatcgtggggaaatagtggagcaagctgcacctgatgaattttttgcgcatcctaaaagtgagcgtacgagggcatttttaagccaggtaatccattaattgaatgttagttcgaaaagcaaaaaggccatcctttcggatggcctttcgcttgatttgatgtctggcagtttatggcgggcgtcctgcccgccaccctccgggccgttgcttcgcaacgttcaaatccgctcccggcggatttgtcctactcgggagagtgttcaccgacaaacaacagataaaacaaaaggcccagtcttccgactgagccttttgttttatttgatgtctggcagttccctactctcgcatggggagaccccacactaccatcggcgctacggcgtttcacttctgagttcggcatggggtcaggtgggaccaccgcgctactgccgccagacaaattcttttctaatctgccgaactttaacctaaaaagtggtgctgatacccagagtcgaactggggacctcacccttaccaagggtgcgctctaccaactgagccatatcagcacgctaaatttgatgcctggcagttccctactctcgcatggggagaccccacactaccatcggcgctacggcgtttcacttctgagttcggcatggggtcaggtgggaccaccgcgctacggccgccaggcaaattctgttttatcagaccgcttctgcgttctgatttaatctgtatcaggctgaaaatcttctctcatccgccaaaacagcttcggcgttgtaaggttaagcctcacggttcattagtaccggttagctcaacgcatcgctgcgcttacacacccggcctatcaacgtcgtcgtcttcaacgttccttcaggacccttaaagggtcagggagaactcatctcggggcaagtttcgtgcttagatgctttcagcacttatctcttccgcatttagctaccgggcagtgccattggcatgacaacccgaacaccagtgatgcgtccactccggtcctctcgtactaggagcagcccccctcagttctccagcgcccacggcagatagggaccgaactgtctcacgacgttctaaacccagctcgcgtaccactttaaatggcgaacagccatacccttgggacctacttcagccccaggatgtgatgagccgacatcgaggtgccaaacaccgccgtcgatatgaactcttgggcggtatcagcctgttatccccggagtaccttttatccgttgagcgatggcccttccattcagaaccaccggatcactatgacctgctttcgcacctgctcgcgccgtcacgctcgcagtcaagctggcttatgccattgcactaacctcctgatgtccgaccaggattagccaaccttcgtgctcctccgttactctttaggaggagaccgccccagtcaaactacccaccagacactgtccgcaacccggattacgggtcaacgttagaacatcaaacattaaagggtggtatttcaaggtcggctccatgcagactggcgtccacacttcaaagcctcccacctatcctacacatcaaggctcaatgttcagtgtcaagctatagtaaaggttcacggggtctttccgtcttgccgcgggtacactgcatcttcacagcgagttcaatttcactgagtctcgggtggagacagcctggccatcattacgccattcgtgcaggtcggaacttacccgacaaggaatttcgctaccttaggaccgttatagttacggccgccgtttaccggggcttcgatcaagagcttcgcttgcgctaaccccatcaattaaccttccggcaccgggcaggcgtcacaccgtatacgtccactttcgtgtttgcacagtgctgtgtttttaataaacagttgcagccagctggtatcttcgactgatttcagctccacgagcaagtcgcttcacctacatatcagcgtgccttctcccgaagttacggcaccattttgcctagttccttcacccgagttctctcaagcgccttggtattctctacctgaccacctgtgtcggtttggggtacgatttgatgttacctgatgcttagaggcttttcctggaagcagggcatttgttgcttcagcaccgtagtgcctcgtcatcacgcctcagccttgattttccggatttgcctggaaaaccagcctacacgcttaaaccgggacaaccgtcgcccggccaacatagccttctccgtccccccttcgcagtaacaccaagtacaggaatattaacctgtttcccatcgactacgcctttcggcctcgccttaggggtcgactcaccctgccccgattaacgttggacaggaacccttggtcttccggcgagcgggcttttcacccgctttatcgttacttatgtcagcattcgcacttctgatacctccagcatgcctcacagcacaccttcgcaggcttacagaacgctcccctacccaacaacgcataagcgtcgctgccgcagcttcggtgcatggtttagccccgttacatcttccgcgcaggccgactcgaccagtgagctattacgctttctttaaatgatggctgcttctaagccaacatcctggctgtctgggccttcccacatcgtttcccacttaaccatgactttgggaccttagctggcggtctgggttgtttccctcttcacgacggacgttagcacccgccgtgtgtctcccgtgataacattctccggtattcgcagtttgcatcgggttggtaagtcgggatgacccccttgccgaaacagtgctctacccccggagatgaattcacgaggcgctacctaaatagctttcggggagaaccagctatctcccggtttgattggcctttcacccccagccacaagtcatccgctaatttttcaacattagtcggttcggtcctccagttagtgttacccaaccttcaacctgcccatggctagatcaccgggtttcgggtctataccctgcaacttaacgcccagttaagactcggtttcccttcggctcccctattcggttaaccttgctacagaatataagtcgctgacccattatacaaaaggtacgcagtcacacgcctaagcgtgctcccactgcttgtacgtacacggtttcaggttctttttcactcccctcgccggggttcttttcgcctttccctcacggtactggttcactatcggtcagtcaggagtatttagccttggaggatggtccccccatattcagacaggataccacgtgtcccgccctactcatcgagctcacagcatgtgcatttttgtgtacggggctgtcaccctgtatcgcgcgcctttccagacgcttccactaacacacacactgattcaggctctgggctgctccccgttcgctcgccgctactgggggaatctcggttgatttcttttcctcggggtacttagatgtttcagttcccccggttcgcctcattaacctatggattcagttaatgatagtgtgtcgaaacacactgggtttccccattcggaaatcgccggttataacggttcatatcaccttaccgacgcttatcgcagattagcacgtccttcatcgcctctgactgccagggcatccaccgtgtacgcttagtcgcttaacctcacaacccgaagatgtttcacttcagagttgcgaaaatttgagagactcacgaacaactttcgttgttcagtgtttcaattttcagcttgatccagatttttaaagagcaaaacttcgcagtgaacctttgcaggtacactctgaagtattttttatttaatcactacagagatggtggagctatgcgggatcgaaccgcagacctcctgcgtgcaaagcaggcgctctcccagctgagctatagccccataacatgtagttaaaacctcttcaaatttgccgtgcaaatttggtaggcctgagtggacttgaaccaccgacctcacccttatcaggggtgcgctctaaccacctgagctacaagcctgtagaggttttactgctcattttcatcagacaatctgtgtgagcactgcaaagtacgcttctttaaggtaaggaggtgatccaaccgcaggttcccctacggttaccttgttacgacttcaccccagtcatgaatcacaaagtggtaagcgccctcccgaaggttaagctacctacttcttttgcaacccactcccatggtgtgacgggcggtgtgtacaaggcccgggaacgtattcaccgtggcattctgatccacgattactagcgattccgacttcatggagtcgagttgcagactccaatccggactacgacgcactttatgaggtccgcttgctctcgcgaggtcgcttctctttgtatgcgccattgtagcacgtgtgtagccctggtcgtaagggccatgatgacttgacgtcatccccaccttcctccagtttatcactggcagtctcctttgagttcccggccggaccgctggcaacaaaggataagggttgcgctcgttgcgggacttaacccaacatttcacaacacgagctgacgacagccatgcagcacctgtctcacggttcccgaaggcacattctcatctctgaaaacttccgtggatgtcaagaccaggtaaggttcttcgcgttgcatcgaattaaaccacatgctccaccgcttgtgcgggcccccgtcaattcatttgagttttaaccttgcggccgtactccccaggcggtcgacttaacgcgttagctccggaagccacgcctcaagggcacaacctccaagtcgacatcgtttacggcgtggactaccagggtatctaatcctgtttgctccccacgctttcgcacctgagcgtcagtcttcgtccagggggccgccttcgccaccggtattcctccagatctctacgcatttcaccgctacacctggaattctacccccctctacgagactcaagcttgccagtatcagatgcagttcccaggttgagcccggggatttcacatctgacttaacaaaccgcctgcgtgcgctttacgcccagtaattccgattaacgcttgcaccctccgtattaccgcggctgctggcacggagttagccggtgcttcttctgcgggtaacgtcaatgagcaaaggtattaactttactcccttcctccccgctgaaagtactttacaacccgaaggccttcttcatacacgcggcatggctgcatcaggcttgcgcccattgtgcaatattccccactgctgcctcccgtaggagtctggaccgtgtctcagttccagtgtggctggtcatcctctcagaccagctagggatcgtcgccttggtgagccgttaccccaccaacaagctaatcccatctgggcacatccgatggcaagaggcccgagggtccccctctttggtcttgcgacgttatgcggtattagctaccgtttccagtagttatccccctccatcaggcagtttcccagacattactcacccgtccgccactcgtcagcgaaacagcaagctgtttcctgttaccgttcgacttgcatgtgttaggcctgccgccagcgttcaatctgagccatgatcaaactcttcaatttaaaagtttgatgctcaaagaattaaacttcgtaatgaattacgtgttcactcttgagacttggtattcatttttcgtcttgcgacgttaagaatccgtatcttcgagtgcccacacagattgtctgataaattgttaaagagcagttgcgacgcggctttcagctcactgtcgcgaggtggcgtatattacgctttcctctttcagagtcaaccctgaatttcaggatttttttctcttcgttgttccgaccatcctgtgaagtgtttcacgttgtcgtctcaacggaggcgcattatagggatcccaattttttgcacaagtatttttttgatctttttttctgtttgttgttttttcaccctttttgctgcaatcgcacacaaaacggtgcttttttgcatactaaaagacttgcacaaggccaataatgcccccaaagtcattagtaaatcatttattgctgaggtaagtatgtctgatgttttacgcccataccgcgatctttttccacaaatcggtcagcgcgtaatgatcgacgatagcagtgtcgtgattggtgacgttcgtctggctgatgatgtggggatctggccgctcgttgtgattcgtggagatgtacattatgtacagatcggagcacgcaccaatatccaggatggcagtatgttgcatgtcactcataaatccagctacaacccagatggcaacccattaaccattggcgaagatgtcactgttggtcacaaggtgatgctccacggctgcaccattggcaatcgagttttggttgggatgggcagtattttacttgatggcgcaatagtagaagatgatgtgatgattggtgcgggtagtctggtcccacaaaataaacggctggagagcggatatctgtatctcggtagccccgtcaaacagatccgcccgttaagtgatgaagagaaggctgggttacgctattccgcgaataattacgtgaaatggaaggacgaatatctggatcagggtaaccagacccagccttgatcatcttcactttgttcctgaattaagttttccgcttcttcttccaggtcccagcgatgctgacgaaaactcgctaaccactgttctggcgtatctccagtaaagcgatacgccagactctcgccagagatcgcgcatgtcagttgcataccattcacgagagcgggaaaacatacacattttttattctcgtcccactcttccctgtccggaaactggatggcctgattcacgcggacaattcctcctgcaattgctttataactggttctacgtcaggcagaacaccgtgccagagaagaaaggcatgagccgcctgtgccaccagcattcctaaaccatcagcattacgcttactgcctcgctgctcacaccatgccagaaaaggagtttttcctttctgatagaacatgtcatagcaataaatgcctggatgaatgaggctactcgggatcgccggaatatcaccactgatgccactggatgttgcattaataatgagatcaaactcatgaccttccagttcgtccatactcaacgcctgaatactgccagtgtgcgcaaacaatttagccaactcttccgcgcgggataccgtccgattagttattgtcaccgcacagtccagggaaaggagtggcagtagtacgccgcgagatgctccaccagcgccgataagcagaatacgtaaaccagggcggataaaagacagacgttccagatcgcttaacaagcctacaccatcggtattgtcacccagcaggcgtccatcttctaaccgcatgagggtattaacagcaccagccaacgctgcccgttcagtaagctcatccgctctggcaaaagcctcttctttaaaaggcaccgtcacattcgcacctttaccaccagcactaaagaaagcgttcagtgtgttgatgaaatcattgatgggtgccaacacgcgcccatagggatgttcaatattcagttgctgagcaaattgctgatgaatgaatgggcttttgctgtgggctatcggattaccaaaaacagcataggtttccattatgttacccctgtcgaaacagttcacccgtcagggcatcgcggatttcactaggatttaaacgcccccccgtttcaccaggcacaaccgggaacgccgcgccaaattgtgcgcgaacttcgtctactgttcgacaaggtggcaatccactcaagttggcactggtagaaaccagcggtttaccataagcctggcacaaagcaaccaccaacggatggtcggtgactcgtacagcaaggctatcaaagcggcccgtcaaccagcgcggtgttgtcgcaggcgcgggaaagacaaaggtgacaggacctggccagcgggaaaaaatggtttcacgctgcacgtcagtcaacatggtgtcatcaatatagggtttaagctgctcgtaatttgctgcgattaaaatcagccccttatcaaccggacgctgttttaactccaacagtcgcatcactgctgtttcgctatcaggatcgcacccaacaccgaaaacggcttccgttggataggcgatgacacgttcttcattgagaacatctatcgcagctgcgatagcgtctctttgcaggttattattcacgttattattccgcgctaaccggctttccacattgtttactggcacaaaagtgttttacaccctgcgcggttttcttttcgatgagtagcggataatgacactcagggcattctccagctatgggtttgaagttaatggcaaattgacactccgggtagcgatcacaagagtgaaatgttttgccataacgggagcggcgctggaccagatggcccgtccgacattgggggcatgtaattgctgtttcgtccggtttatcgataagttcggtatgttcgcattcagggtagttaatgcaaccaataaacataccaaagcgtccctggcgtaataccagatttgcgccacatgcagggcaaacctgcccctccagaactttgacgatatgtccatccgcactagatttcagaggacggacgtagtcacacgccggatactgactgcatccaagaaacggaccgtgtttcccggatcgaataaccagttcagccccgcactttgggcaggactcattattacgcaccgtgaacagtgcacttttcgccataacaacttatgctgaattaaagaaatgattaatgcagcataccttcattcacttcaaagagtaattcttccatttgctggtacgcattttcgcagcccggaatattgaacaacaccatcaggatcacccatttcagatcatccagttcgaactctgcgttatccagcgcgagcactcgctctatcaccatttcacgagtttcaaggttgagcacctgaatctgctcaaggaaaagcagaaacccacggcagctggcatccagtcgttcacactcttccggtgtataaatacgcatggagagaggatcgctggccagttgcatcggttctgccaacccttcctgataatcagcaagtttttccagccatagcagggcattgtagatatcttctcgctcaaaacctgcgtcggtaagatcctgttcaagtttgtcttgatccacacgcaactcagcttctgtgtgaatataggtttcaaacaaatacattagtacgtcgaacatggcatgccctcctcaatcggacatagccgccgggtacagctgcgatccatcctgctaactccagttcgagtagttgagtaactacctctggcacaggttggccggcacgttcagcgacgacgtcaacaggtgttacctcatctcctacgttagccaggagctcaggaaatggcaatgccacgtcttgctgatctggactataaaaactattttcaggggcgtctggcaaccagtgcaatccaaattgcaagttttccagaatttcttccggttccgtcacaagaatcgcaccttgttttattaaccagtgaggcccttcgcttcccggattccctattggacctggcaaggcaaaaacttctcgcccctgctcaagcgcacaacgtgctgtcaccaggctaccactacgcaaagccgcttccaccaccagtacacctttacttagaccactgataatgcgatttcttcgtgggaaattgtaagcaaggggtggaacatcgaggggaaattcgctgacgagagcgcccccctgttcaagcagactggcagccagtcgggcatgacggcggggatgaatggtattaagtccattccccaatacagcaatgctgacgccatttacctgtaaggctgctttatgcgctacaccatcgattccacgcgccagtccactcgtaattgtcactccacgcgtcgccagagtttcgcaaaataatcgtccccatcgctcgccataccaactatgcgcccgactccccactacggcaagctgaaaactatgcagcgcgtgcagttctccttcaacaaacagtgcgccggggtaatctgtcgtcgccagaagttgaggaggataaaattcgctgtccgcaggaattaaatgatggttgggttgctccaaccaacaaagactgctttcgatactctttcgtggaaaactaagaaagcgttgtgcctgccgcaatgtaagccctgtttgctgcaatacaaccgcatcaatatggctctgttttgccacccagtgagcgatacggaccatatcatcgccgtacaagctgctgatactcattaaacgcagccaaatttctgtatcgaccatccttatctccctgccataagcagccttagcaatctttgcgattggtcagtgatgctgtcaatcagagggggatttgtctagaatagaagaaataatctttctaactcctgaacacatctctggagatttatgagtgttttgcaagtgttacatattccggacgagcggcttcgcaaagttgctaaaccggtagaagaagtgaatgcagaaattcagcgtatcgtcgatgatatgttcgagacgatgtacgcagaagaaggtattggcctggcggcaacccaggttgatatccatcaacgtatcattgttattgatgttagcgaaaaccgtgacgaacggctagtgttaatcaatccagagcttttagaaaaaagcggcgaaacaggcattgaagaaggttgcctgagcatccctgaacaacgtgctttagtgccgcgcgcagagaaagttaaaattcgcgcccttgaccgcgacggtaaaccatttgaactggaagcagacggtctgttagccatctgtattcagcatgagatggatcacctggtcggcaaactgtttatggattatctgagtccgctgaaacaacaacgtattcgtcagaaagttgaaaaactggatcgtctgaaagcccgggcttaaggataagaactaacgtgagtgaaagtctacgtattatttttgcgggtacacctgactttgcagcgcgtcatctcgacgcgctgttgtcttctggtcataacgtcgttggcgtgttcacccagccagaccgaccggcaggacgcggtaaaaaactgatgcccagcccggttaaagttctggctgaggaaaaaggtctgcccgtttttcaacctgtttccctgcgtccacaagaaaaccagcaactggtcgccgaactgcaggctgatgttatggtcgtcgtcgcctatggtttaattctgccgaaagcagtgctggagatgccgcgtcttggctgtatcaacgttcatggtagtctgctgccacgctggcgcggtgctgcaccaatccaacgcagtctatgggcgggtgatgcagaaactggtgtgaccattatgcaaatggatgtcggtttagacaccggtgatatgctctataagctctcctgcccgattactgcagaagataccagtggtacgctgtacgacaagctggcagagcttggcccacaagggcttatcaccacgttgaaacaactggcagacggcacggcgaaaccagaagttcaggacgaaactcttgtcacttacgccgagaagttgagtaaagaagaagcgcgtattgactggagtcttagcgcagcacagcttgaacgctgcattcgcgctttcaatccatggccaatgagctggctggaaattgaaggacagccggttaaagtctggaaagcaagcgtcattgatacggcaaccaacgctgcaccaggaacgatccttgaagccaacaaacaaggcattcaggttgcgactggtgatggcatcctgaacctgctcagcttacaacctgcgggtaagaaagcgatgagcgcgcaagacctcctgaactctcgtcgggaatggtttgttccgggcaaccgtctggtctgatagtccactcttctaagcccggtcttgccgggcgtttttatacttatgaaaaaacaacgtaatttacgtagcatggcggcccaggccgttgaacaagtcgtcgagcaagggcaaagtttaagcaacattctgccaccgctccagcaaaaagtttccgataaagacaaagcacttcttcaagagttgtgctttggcgtactgcgtacgcttagccagttagactggctgattaataagttaatggcccgtccgatgaccggcaaacagcggaccgtgcattacctgattatggttggtttgtatcaactgctttatacccgcattccacctcatgctgcgctggctgaaacggttgaaggcgctatcgcaattaagcgtccgcaacttaaagggttgataaacggtgtattacgccagttccagcgtcagcaagaagagttattagccgagtttaatgccagtgatgcacgttatctgcatccttcctggttgctgaagcgtctgcaaaaagcgtatccagagcagtggcaatccatcgtcgaagccaataaccagcgtccgccaatgtggctgcgtattaatcgtacgcatcattcccgcgacagctggcttgcattgctggatgaagcaggaatgaaaggtttcccgcatgcggattaccctgatgctgtacgtctggaaacacctgcacctgttcatgcgctacctggttttgaagacggatgggttaccgttcaggatgcaagtgcacaaggttgcatgacctggcttgcgccacaaaacggtgaacacattttggatctttgtgccgcccccggcggtaaaacaacgcatatccttgaggtggcaccagaagcgcaggttgttgcggttgatatcgacgaacagcgcctctctcgggtttacgacaatttaaaacgccttggtatgaaggcgaccgtgaaacaaggtgatggccgttacccttctcaatggtgtggcgagcaacagtttgatcgcattttattagatgcgccttgtagtgcaaccggtgtgattcgtcgccatccagatattaaatggttacgtcgcgatcgcgatatcccggaactcgcgcaattgcagtctgaaattctcgacgccatttggccgcatttaaaaaccggtggaactctggtctatgccacctgtagcgtgttaccggaagagaatagcctgcagattaaagcctttttgcaacgtaccgctgatgccgaactttgcgaaacaggaacaccagagcaaccgggtaaacaaaatctacctggtgccgaagagggcgacggcttcttttacgctaagctaatcaaaaagtgatgagataacgggtcgcgactgatgaaaattatcattctgggtgccggccaggttggcggcacactggcggaaaacctggttggcgagaacaacgatattactgttgtcgataccaacggtgagcgtctgcggaccttacaggataaatttgacctgcgggtcgtgcaggggcatggctctcatccacgcgtattgcgggaggcaggtgccgacgacgccgatatgctggttgctgtaaccagtagtgatgaaaccaatatggttgcctgccaggtagcctacagtcttttcaacacccctaatcgcatcgctcgtatccgcagtccagactacgtgcgcgatgccgataagctatttcatagtgatgctgtgccgattgatcatctgatcgcaccagagcagttggttatcgataatatttaccgactgattgagtatcccggcgcattgcaggtggtgaacttcgctgagggtaaagtcagcctggctgtggttaaagcctattatggcggcccgctgattggtaatgcacttagcaccatgcgcgaacatatgccacatatcgatactcgtgtggcagcaattttccgccacgatcgccccattcgtccgcaaggtagcaccattgttgaagctggtgatgaagtgttctttattgccgctagtcagcatatccgcgcggtgatgagtgaattacagcgactggaaaaaccgtataagcggatcatgctggttggtggcggtaatatcggtgcagggctggcgcgtcgtctggaaaaagattacagcgttaaactcatcgaacgtaatcagcagcgcgctgccgaactggcggaaaagttacagaatacgatcgtcttttttggtgatgcgagcgatcaagaactactggccgaagaacatatcgatcaagttgatctgtttattgccgtcaccaacgatgacgaggccaatatcatgtccgccatgcttgccaaacgtatgggtgcgaaaaaggtgatggtattgatccagcgtcgcgcttatgtggatctggttcaggggagcgttatcgatattgcgattagtccacaacaagcaactatttctgcgttgcttagccatgtgcgaaaagcagatattgttggtgtttccagtttgcgccgcggcgtagcagaagctattgaagccgttgctcacggtgatgaaagcaccagtcgcgttgtcggcagagtcattgacgaaatcaagctaccgccaggaacgattattggagcggtggtacgtggaaacgacgtgatgattgccaatgacaatctgcgcattgagcaaggcgatcacgtaattatgttcctcacagataaaaagtttattaccgacgtcgaaagactcttccagccaagccctttcttcttgtaattaataaggcgtctaatgacgccttattatttccctttgattatcaaggattaattaaattcattcctggcaggaaaatggcttaacatttgttagacttatggttgtcggcttcatagggagaataacatgagcattattaaagaatttcgcgaatttgcgatgcgcgggaacgtggtggatttggcggtgggtgtcattatcggtgcggcattcgggaagattgtctctagtctggttgccgatatcatcatgcctcctctgggcttattaattggcgggatcgattttaaacagtttgctgtcacgctacgcgatgcgcagggggatatccctgctgttgtgatgcattacggtgtcttcattcaaaacgtctttgattttctgattgtggcctttgccatctttatggcgattaagctaatcaacaaactgaatcggaaaaaagaagaaccagcagccgcacctgcaccaactaaagaagaagtattactgacagaaattcgtgatttgctgaaagagcagaataaccgctcttaacaagcgccactaagcagaagaccagtggtaaaaaagtgatttactttcttgccactggcctcccagttcccccgattgccatgttttccttttcgcatgtaactgcctttccccttcttatttttctctacgcgctgtcggaataagggatcatgtagtaatgcttctatcgcattatcctttatctgccctttagtatgctgatatcgactcataaaaactccagttggttatttaacggcgcgagtgtaatcctgccagtgcaaaaaatcaacaaccactcttaacgccactcgccccttgttcaagagcttcaagaatgctacaataaacactgctatgagcagtcccacaacaggcatcgttaaggcgttgcaaggaacgctgcatactctgcaactcggctatccgtgcttcgacttcctgcaatctttcctgcacaatgcctttactctcctgacaggtatggtgttcaggatcgatgcggatgctcagcaactcgcggatgctctccagactgaaacctagttgtctggcatggcggataaatttcaatcgctggagatcgctttcggtatataggcgaaacccaccttcagtacgcacttcatgctccatcatctgctgtttttcgtaataacgaatcgtgtcgggtgttacttccgccatttttgccagctcaccaatgcgatacatacatactccattagttatcgttgattttgtccaacaacttgtcagcataatcgccgcgtaaaaaatcggtactcaatccagcttgtcgcagcttcaattccagtaaactcaatcgacggctaacctcttgatattgcggatcatcgtgacggatacctttgagaatatccagaagctgaattgcttctctccgttgctcaagttctggcggtaagcaaccggcattcttcagcaagcgataccccgcacgtaattccggtggcacgtgagaatcatcatccagtatcaatggttcgccgctacctgccaggttatcaaactcacctttcgcttgcgcttctgctatatggcgctctgcccactggtcaagtaaccacataaatactccaggggatgaacaaaaagagtacagctattgtagataagtggggatactacgggtataaaaaaacccgccggggcgggtttttttacgttgcttcagattactctgcagcagcttctgctttctcactacgatcaaccagctcgatgtaagccatcggcgcgttgtcgcctgcacggaagccacacttcagaatacgagtgtaaccaccggcacggctcgcgaaacgcgggcccagttcgttaaacagttttgccacgatctcgttatcacgagtacgggtgaatgccagacgacgattagcaacgctatcagtcttggcaagagtaatcagcggctcaactacgcggcgcagctctttcgctttaggcagagtcgtcttgatgatttcatgacgaaccagactacctgccatattgcggaacatagcctggcgatggctgctgttgcggttcagttgacgaccactcttacgatggcgcatgaccttatccttctcagtaaaaccttaacctgtgattcggttactcgtcagcgatgcttgccggtggccagttttccaggcgcatgcccagagacagtccacgggaagccagcacgtctttaatctcagtaagagattttttaccaaggttaggcgttttaaggagctcaacctcggtacgctgtaccagatcaccgatatagtggatagcttctgctttaaggcagttagcagagcggacagtcaattccagatcgtcaacagggcgcagcaggatcggatcgaactctggtttctcttctttcacttcaggctgacgtacatcacgtaagtcaacgaaagcttccagttgttcagccagaatggttgccgcacgacgaatcgcctcttcaggatcgattgtgccgttggtttccatttcgatgaccagcttgtccaggtcggtacgctgttctacacgcgctgcttcaacattgtaggcaatacgctccacagggctgtagcatgcgtcgaccagcagacggccgattgggcgctcatcttcttcgctatgaattcgggtagaagccggcacataaccacgaccgcgctgaactttgatacgcatgctaatagacgcgttctcatcggtcaggtggcagatcacgtgctgcggcttgacgatttcgacatcaccgtcgtgggtgatatcggctgcagtcacagggccaatgccagatttattcaaggtaagaataacttcatctttgccctgaactctcaccgccagccctttcaggttgagcaggatttccaggatatcttcctgaacgccttctttggtgctgtactcatgtagtacaccatcaatctcaacctcggtcaccgcgcaacccggcatgctactgagcagaatacggcgcagtgcgttacccagagtatggccaaagccacgctctaaaggctcaagggtcaccttggcgtgcgtgctactcacttgctcgatatcaaccaggcgcggttttagaaactctgtcacagaaccctgcattgtgtcctctctttggtactaagctttacttggagtaaagctcgacgatcaggtgttcgttaatgtccgcagacagatcagaacgctccggcttacgcttaaacgtaccttccatcttgccagcatcaacttccagccaggttggcttttcacgctgctcagccagctccagagcggctttcacgcgagactgcttcttcgctttctcacgaatgcttacaacgtcattcggactaacctgataagaagcgatgttaacaacacgaccgtttaccataattgctttatggctaaccagctgacgtgcttctgcacgagtggcaccgaagcccatacggtatacaacgttgtccagacgaccttccagcagagccaacaggttttcaccggtgttgcctttcagacgtgctgcttctttgtagtagttacggaactgacgctccagcacaccatagatacggcgaactttttgcttttcacgcaactgcacaccatagtcagacagacgcggtttacgcgcaccgtgctggccaggagcttgttcaattttacacttggtatcgatcgcgcgaacgccagacttaaggaataagtcggtgccctcacgacggctcagcttgagcttaggacccaaatatcttgccattttctttctccaacaaacctggaaaacgaggcgttatacgcgacgttttttcggcggacgacaaccgttatgagggatcggagtcacatcagtaatgttagtgatgcggaaacctgcggcgttcagagcacgaatagtagattcgcggcctggacccggacctttaaccataacttccagattcttgatgccgtattctttcacggcgtcagcgcaacgctctgctgcaacctgagctgcaaacggagtggatttgcgagaaccacggaaaccggaaccaccggctgttgcccaacccaacgcgttaccctgacgatcagtgatagtcacgatggtgttgttgaaagaagcatggatatgagccacgccgtcagagacttgttttcttacacgtttacgtgcacgaattggtgcctttgccattattcaatcaccccgattatttcttgatcggtttgcgcggacccttacgggtacgtgcgttggtcttggtacgctgaccgcgaaccgggagaccacgacgatgacgcaaaccgcgatagcaaccaagatccatcaggcgcttgatgctcatgctgatttcacggcgcagatcaccttcaacgacaaatttggcaacttcgtcacgcagcgtgtcgatttgtccttcagacagctcactgatcttaacatcttcagcgatacccgctgcagccaggatggctttagaacgggtcttgccgacgccataaatgctagttaatgcgattacggcatgcttatgatcaggaatgttaatgcctgctatacgggccactatgcactcctactatttaatatgtacgttccatgctgaaaagcccgttttcaggatactcaaatggaaacgcacagacatacaaaagattggctggctaatctagccagctcaacccaactttgcaagaaaaatatgcgaaaaaatcagccttggcgctgtttatgcttcggctcggcactgcaaatcacacggatgacaccatcacgcttaacgattttgcagttacggcataatttcttgacggaagcacgaactttcatttttactctccgtaacttctcgggcgaccaattatcggccgtagcctttcaggttcgccttcttcaatgcagactcatactgactggacatcatcagagtttgcacttgagccataaagtccataatcacgacaacaacgataagcagactggtcccaccgaagtagaacggtactttcattgcatcacgcatgaactccgggatcaggcagataaaggtaatatacagcgcaccaaccagggtcaggcgggtcattactttatcgatatacttcgccgtttgctctcccggacgaattcctggtacaaatgcaccggacttcttcaggttatctgctgtttcacgcgggttgaaaaccaacgccgtgtagaagaaacagaagaagatgattgcagacgcatagagtaacacataaagcggttgcccaggctgcaaatacaggctaattgttgtcagccagttccaaccagtaccgcccccgaaccaactcgcgatggtcgccgggaacagaataatactggaagcgaagattgccgggattacccccgccatattcactttcagcggtaaatgtgtgctctgtgcagcatagacacgacgaccttgctgacgtttcgcgtagtttaccacaatgcggcgttgaccacgctcaacaaatacaacaaagaacgtcactgcaaatactaatactgcaaccaacagcaacacgaggaagtgcaggtcgccttgacgcgcttgctcgatagtatgggcaatggctggcgggagtcccgcgacaataccggcgaagataatgatactaataccgttgccgatacctcgttcagtaatctgttcgcccaaccacatcaggaacatggttcctgtgaccagacttacaacagcggtgaagtagaatgcaaagcccgggttaatcaccaggccttgcataccaggcatattcggcagaccggtagcaataccgatgctctggaatattgccagcaccagagtaccgtagcgggtgtactggctgatcttacgacgaccagactccccttctttcttaatttctgccaacgttgggtgaaccaccgtcagcagctggataatgatgctcgcgctaatatacggcatgatccccagagcaaagatagaagcacggctgagagcaccaccagagaacatgttaaacatctcaatgatggtgcctcgctgttgctcaagcagtttggcaagtacagcggcatcaataccagggatcggaataaaagagccaatacggaacacaatcagcgcaccgataacaaacagcagtctgcgtttcagctcgcctaagccacctttggcactttgaaaatctaatcccggttgtttagccatctgctacttattcctcgattttaccgccagcagcttcgatagcagcacgagcgcctttagtaacacgcaggccacgaacagttaccggagtcgttacttcgccagccaggatcactttcgcgaactcgatctggataccgataatgttagccgctttcagcgtgttcaggtctactacaccgccttctactttagccaggtcagacagacgaatttcggctgtaatcgctgctttacgagaagtgaagccgaatttcggcagacgacggtacagaggcatctgaccaccctcgaaaccgcgacgtacgccaccgccagaacgagacttctgacctttgtgaccacgaccaccggttttaccgaggccagaaccgataccacgacccaggcgtttacccgcctttttggagccttcggccggagacagagtatttaaacgcatctcttactcctcaactttaaccatgaaggaaaccgcgttgatcataccgcgaatagcaggagtatcctcgcgctctacggtgtgaccaatacgacgcagacccaggccaagcagcgttgccttgtgtttcggcagacgaccgattgcactgcgggtttgagtaattttaatagtctttgccatggtttatttccccagaatttcttcaacggatttaccacgcttggcagcgaccatttctggagaattcatattttccaggccatcaatagttgcacgaaccacgttgatcgggttggtggaaccataggctttagccagaacgttatgaaccccagcgacttccagaacggcgcgcattgcaccaccggcgatgataccggtaccttcggaagccggctgcatgaatacgcgagaacccgtgtgaacacctttaacagggtgttgcagagtgccgttattcagcgcgacgttaatcatattgcgacgggctttttccatcgctttctggatcgctgctggaacttcacgcgctttaccgtaaccaaaaccaacgcgaccgttaccatcgccaactacagtcagagctgtgaaggagaaaatacgaccacctttaacggttttagatacgcggtttaccgcgatcagcttttcctgcagttcgccagcttgtttttcgatgtgagccatcttacacctctaccttagaactgaaggccagcttcacgggcagcatctgccagtgcctggacacgaccatgatattggaacccggaacggtcaaaggatacatctttgatgcctttttccagagcgcgttcagcgacagctttacccacagctgcagccgcgtctttgttaccggtgtacttcagttgttcagcgatagctttttctacagtagaagcagctaccagaacttcagaaccgttcggtgcaattacctgtgcgtaaatgtgacgcggggtacgatgtaccaccaggcgagttgcgcccagctcctggagcttgcggcgtgcgcgggtcgcacgacggatacgagcagatttcttatccatagtgttaccttacttcttcttagcctctttggtacgcacgacttcgtcggcgtaacgaacacccttgcctttataaggctcaggacgacggtaggcgcgcagatccgctgcaacctggccgatcacctgcttatcagcgcctttcagcacgatttcagtctgagtcggacattcagcagtgatacccgcaggcagctgatggtcaacaggatgagagaaacccagagacaggttaatcacattgcctttaaccgctgcacggtaacctacaccaaccagctgcagcttcttagtgaagccttcggtaacaccgataaccatactgttcagcagggcacgcgcggtaccagcctgtgcccaaccgtctgcgtaaccatcacgcggaccgaaggtcagggtattatctgcatgtttaacttcaacagcatcgttgagagtacgagtcagctcgccgtttttacctttgatcgtaataacctgaccgttgatttttacgtcaacgccggcaggaacaacgaccggtgctttagcaacacgagacattttttcctccgattaggctacgtagcagataatttcgccaccaagaccagcctggcgcgctgcacgatcagtcataacacctttagaggtagaaacaactgcgatacccagacccgccataactttcggcagctcatctttacgtttatagatgcgcagacctgggcggctgacacgctgaatgctttctacaacagctttgccctggaaatacttcagagtaagttccagttcaggcttggtgtcgccttcaactttaaaatcttcaataaaaccttcttccttcagcacgttggcgattgccactttcagcttggaggaaggcatggtgaccgcagctttgttcgcggcctgaccgttacggatacgggtcagcatatccgcgatcggatcttgcatgctcatctgtctttactcccgtgattcaattggtgacaattaccagctagcctttttcagacccgggatttcaccgcgcatagcggcttcacggaccttaatacggctcaacccgaacttccgcaggaaaccatgcggacgacctgtttgacggcagcggttacgctgacgagacgggctggaatcacgcggcagagtctgcagcttgagaacagcgttccaacgatcttcgtcggaagcgttcacatcagagatgatcgctttcagttcagcgcgtttcgcgaagtatttatcagctaaagctacgcgttttacttcgcgtgctttcatactttgcttagccatttagtaaccctaccttacttgcggaacgggaagtcaaaggcagccagcagagcgcggccttcttcgtcagatttcgcagtagtggtaatggtaatatccaaaccacgaacgcggtcgactttatcgtagtcgatttctgggaagatgatctgctcacggacacccatgctgtagttaccacgaccgtcgaaagacttagcggacaggccacggaagtcacggatacgaggtacagcaatagtgatcaggcgctcaaagaactcccacatgcgttcgccacgcagagttactttacagccgatcggatagccctgacggattttgaagcctgcaacagatttgcgtgctttggtgatcagcggtttttgaccggagattgctgccaggtctgctgctgcgttatccagcagttttttgtcagcgatcgcttcaccaacacccatgttcagggtgatcttctcgacccgagggacttgcatgacagaattgtagttaaactcagtcatgagttttttaactacttcgtctttgtagtaatcatgcagtttcgccatcgtactactccaaattacttgatagtttcgctgttagacttgaagaaacggacttttttaccgtcttcgaatctaaagcctacacggtcagccttgccggttgccgcattgaagattgctacgttggaaacctgaatagcggcttctttttcaacgatgccacccggttggttcagggccggaaccggcttctgatgtttcttaaccaggttgataccttcaacaatgaccttgccggaagacaggacattcttaactttaccgcgtttacctttatctttaccggttaacacgataacttcgtcatcacgacggattttcgctgccatgattcgctccttagagtacttctggtgccagagagataattttcatgaacttctcactacgaagctcacgagttaccggcccaaaaatacgcgtaccgataggctgctcgctgttgttgttcagaagaacacaagcattaccatcgaagcgaatgacagaaccgtccgggcgacgaacacccttcttggtgcgcaccactaccgccttcagcacatcaccttttttgaccttaccacgcggaattgcttctttgatggtgatcttgatgatgtcgcctacgcctgcgtagcgacggtggctgccacccagaaccttgatacacattacgcgacgtgcaccggagttgtcggcgacgttcagcatagtctgttcttggatcattttagtgctccgctaatgtcaactactactgagacccgaaaatcaggtcgttaaaaatccccatatcgagggcgcggcattataacaccgcttcaaggatatgggtagaaaaaataaacggctcatttctgagccgtttattcgtattgagagagtgtactgtattacagaaccgctttctctacaacgcgaaccagcgtccaggatttagtcttggacagcggacggcattcgcggatttcaaccacgtcaccgataccgcattcgttgttctcgtcatgtacgtgcagtttggtcgtacgcttgatgaatttaccgtagatcgggtgtttcacaaaacgttcgatagcaacaacaatggatttctccattttgtcgctaacaacgcgaccttgcagagtacggattttatcggtcattacgcacccgccttctcgttcagtaaagtcttaacgcgtgcgacatcgcgacgcacttgcttcaacaggtgagactgttgcagctggccacttgcagcctgcatacgcaggttgaactgctcacgcagcaggttcagcagctcggtgttcagctcttcaacgctcttctcacgcagctcttttgctttcattacatcaccgtcttagttacaaaggtggttttaatcggcagtttcgctgctgccagcttgaatgcttcacgggccagctcttccggaacaccgtccatttcatacaggactttacccggctgaatcaaggcaacccaatactccacgttacctttacctttacccatacgcactgccagcggcttttcagtgatcggtttgtccgggaacacacggatccagatcttaccttgacgcttaactgcacgggtcatagcacgacgtgctgcttcgatctgacgggcagtcagacgaccacggccaacagctttcagaccgaagctgccgaagctaacatccgtaccctgcgccagaccgcggttacggcctttgtgcattttacggaattttgtacgctttggttgtaacatcagcgacgctccttatttacggcctttacgctgctgctttttaggctgagcagccggtttttccggttgttcaacagcagccataccacccaggatctcgcctttgaagatccacactttaacgccgattacaccgtaagtggtgtgcgcttcagaggtgttgtagtcgatgtcagcacgcagagtgtgcagcggtacgcgaccttcgcggtaccattcggtacgtgcgatttccgcgccgcccagacggccgctaacttcaactttaatacctttagcgcccagacgcattgcgttctgtacagcacgcttcatagcacgacggaacataacgcgacgttccagctgagaagtgatgctgtcagcaaccagttttgcgtccagttcaggcttacgaacttcggcgatgttgatctgtgcaggaacgccagcgatgtccgctacgaccttacgcagtttttctacgtcttcaccttttttaccgataacgatacccgggcgagcagtgtgaatggttacacggatgctcttagccggacgctcgataacgatacgagatacggacgctttagccagttccttagtcaggtactgacgtactttaaaatcgctgtccaggttgtcagcgaattctttggtgttcgcaaaccaggtagagttccatggttttacaatacccaggcgaataccattaggatgtactttctgacccattgctagtctccagagtctcagcgatcggacacaaccacagtgatgtggctggtgcgcttcaggatgcgatctgcacgaccttttgcacgcggcataatgcgcttcatgctcgggccttcgtctacgaaaattttcgtaactttcagatcgtcaatgtcagcgccatcgttgtgttcagcgttagcaatggcagattccagaactttcttgaccagtacagccgctttcttgttggtgtaggtcaaaatatccagagcctggctcactttcttaccgcgaatcaggtcagcaacaaggcgaaccttctgagcagaagaacgagcatggcgatgtttagcgatagtttccatctcttcctcctaccttatttcttcttcgcttttttatcagcagcgtggccgcgataagtacgagtcggtgcgaattcacccagtttgtgaccaaccatttcgtcggttacaaataccggaacgtgctgacgaccattatggacagcgatggtcaaaccgatcatgttaggaaagatcgtactacgacgggaccaagtgcgcaggggcttcttgtctccgctttccaccgctttctctaccttcttcagcaagtgcaggtcaataaaaggacctttcttgagagaacgtggcatggcttatcctctaaaattatttgctacggcgacgtacgatgaatttatcagtacgcttgttgctgcgggtcttcttacctttggtctgaacgccccacggagttaccgggtgcttaccaaagttacgaccttcaccaccaccatgtgggtggtctaccgggttcatcgcggtaccgcgaacggtcggacgaacaccacgccagcgtgcagcacctgctttacccagaacgcgcagcatatgctcagcattgccaacttcgcccagagttgcacggcagtctgcttctactttacgcatttcaccagaacgcagacgcagggtgacataagcaccatcacgagcaacgatctgaacgtaagtaccagcggaacgtgccagctgaccgcctttacctggtttcatttctacgttatgaacagtagaaccaaccgggatgttgcgcatcggcagggtgttacctggtttgattgcagcatcaacgccagactgaatctggtcgccagctttcaggcctttaggggccaggatgtaacggcgttcaccgtctttgtacagaaccagcgcgatgttcgcggaacggttcggatcgtactcaagacgttcaacaactgccgggataccgtctttgttgcgtttgaagtcaacaatacggtaagcctgcttgtggccaccaccgatatgacgagtggtgatacggccattgttgttacgaccaccggatttgctgtttttttccagcaacggagcaaaaggtttgcccttgtgcagctcagggttaaccactttaactacgtggcgacgacccggagatgtcggtttacatttaacaactgccattgtattactcctccgacttactcagcgccgccaacgaagtccagattctggccttctttcagggtgacgtaagcttttttccagtcgctacgacgaccgatacgctgtccgtgacgtttaactttccctttaactaccagggtgttaacgacttcgacttcgacttcaaacagtttctgcacagcagctttgatttctgctttggtcgcgtctttagcaactttgagtacgatggtgttggatttttccatcgcagtagacgctttttcagaaacgtgcggtgcacgcagcaccttcagcagacgttcttcacgaatcatgccagcatctcctcaacttgcttaacagcatcagcagtcattacgactttgtcgaaggcgatcaggctaaccgggtcgataccagttgcatcgcgtacgtcaaccttgtgcaggttgcgcgcagccaggaacaggttttcgtccagctcaccggtgatgatcagcacatcttccagagccatgtctttcagtttctgtgccagcagcttagttttcggcgcttctacagagaacttctcgacaacgatcagacgatcctgacgtaccagttcggacaggatgcttttcagcgcgccgcggtacatcttcttgttaactttttgactgtggtcctgcggacgagcagcaaaggtcacgccaccagaacgccagatcgggctcttgatagaaccagaacgcgcacggccggtgcctttctggcgccacggttttttaccggaaccagttacttcagcacgagtcttctgagcacgagtaccctgacgagcaccagctgcataagcaacaacaacctggtgaaccagcgcttcgttgaaatcacgaccgaaggtagtttcggaaacagtcagcgcgctctgcgcgtctttcaatactaattccattgctatctccttacgccttcacagctggtttaacgatcaggtcgctaccggttgcacccgggacagcacctttaaccagcagcaggttgcgctcagcgtcaacgcgtactacgtcaaggctctgaacggttacacgttcgttacccatctgacctgccattttcttgcctttgaacactttgcccggagtctggttctgaccgatagaacccggaacgcggtgagacaaggagttaccgtgagtagcgtcctgggtacggaagttccagcgcttaacggtacctgcgaaacctttacctttagaggtgccagttacgtcaacttttttaacgtcagcaaacagttcaacgctaatgctctgacctacagtgaactcttcgccttcagccaggcggaattcccacagaccacggccagcttctacgccagctttagcgaagtggccagcttcaggcttggtcacacggttagcttttttagcaccggtggtcacctgaatagcacggtagccatcgttagccaggtctttaacctgagtaacgcggtttgcttcaacttcgattacggttactgggatagaaacgccgtcttctgtgaagatacgggtcatacccacttttttaccgactaaaccaatcattgtttcaacctctcaatcgctcaatgacctgattaacccaggctgatctgcacgtctacaccggcagccagatccagacgcatcagagcatcaacggttttctcggttggctcaacgatgtcaaccagacgcaagtgagtacggatttcgtactgatcgcgcgcgtctttgttgacgtgcggggagatcagaacagtgaagcgctctttgcgtgtcggcagcgggatcggaccacggacctgcgcaccagtgcgcttggcagtctcgacgatttccgcggttgcttgatcgatcagacgatgatcaaacgctttcaggcggatacggattctttggttctgcatgagaccagagctccaattattttataaacgaaaatgattactcctcagacccattacgattgatgggagagtgtaaccgttcttacgtagctccccgattgggagcattgttaggtagccaaattcggctaactgaggttcagattgaacctgctgtcaactacgacaagcccgcgcattatacatacttaaccaccgaacgcaagcgtattgctagtaaagtaaacagccttcgggttatctctcaagttcgttcagtgcatttttgacacgctctcttaaaccggctttctcttcgctttcttccacagtattttcttcgtcttcagaagaagagggggcattctcaaccgcgacgcctgggtcatcttcctcctcgacggattcgacgacggggagtggctgttttttgaagaaatagtgttgtgtactttgtttaaaagcgggcgtttcagcctctacagtgacttcggcttttactatccaaagcacccatagctgcctggcatacccaccaaccagcaccattcctgcaaaccacaggcaaatcagtaataaacaaattacatatattatggtgctgtgtttttgtcgggagaagataccagggtgacctgtttctttctgctcacgcgcggcgatatagaattcaaacattataatcccttgtgacgtaaaaactgcaaaacaaaagtcctacgcaggaattatttacgttttacgagaacccttcaatatgaattaaattacggcattaaaaataagaaaaaagcctgacaaatgaagcattttaaaaacagaaacattcatatttaaaatgttaaattgaattgatattttaaatatgaataatttattcgttctgacagtacgaataagatatgccgtcaacaaatgcaaaaagggcgccgaagcgcccttttcaattcaaaactaattaacgtgtaattagcccagaactttagcaacaacgcccgcgccaacggtacggccgccttcacggattgcgaaacgcagaccgtcgtccatcgcgatcgggtggatcagggtaacaaccattttgatgttgtcgcccggcattaccatctctacgccttccggcagttcgatggtaccagtcacgtcagtagtacggaagtagaactgcggacggtagcctttgaagaacggagtatgacggccgccttcatctttggacagaatgtacacttcagattcgaacttggtgtgcggcttgatggtgcccggcttagccagtacctgaccacgttcgatttcttcacgtttgataccacgcagcagaacacctacgttctcaccagcacggccttcgtccagcagtttgcggaacatttcaacgccagtacaggtagacttctgagtctctttgataccaacgatttcaacttcttcaccaactttgatgataccgcgttctacacgaccggtaacaacggtaccacgaccggagatggagaatacgtcttcgatcggcagcaggaacggcttgtcaatcgcacgctctggttccggaatataagaatccaggaagccagccagttccaggattttcgcttcccactctgcgtcgccttccagcgctttcagagcagaaccacgaacgatcggagtgtcgtcgcccgggaagtcgtactgagacagaagttcacgaacttccatttcaaccagttccagcagctcttcgtcatcaaccatgtcgcatttgttcaggaacacgatgatgtacggaacgcctacctgacgacccagcaggatgtgctcacgagtctgcggcatcgggccgtcagtcgcagcaactaccaggatcgcgccgtccatctgagcagcaccggtgatcatgtttttaacatagtcggcgtgccccgggcagtctacgtgtgcgtagtgacgggtcggggtgtcgtattcaacgtgagaagtgttgatggtgataccacgagctttttcttccggcgcgttatcgatctggtcgaatgcacgagcagcaccgccgtaggttttagccagtacggtggtgattgcagcggtcagagtagttttaccgtggtcaacgtggccgatagtaccaacgttaacgtgcggttttgtacgttcaaatttttctttagacacggctatattccttactatagtgctctccccttcaggagagagcacgggactttggtattaacccttaggcttatttaccacgggcttcaattacggcctgagcaacgttactcggcgcttcatcatacttcaggaattccatagtgtaacttgcacgacctttggtcagagaacgcagctgagttgcgtatccgaacatttcagacagcggtacttcagcgtggatcttaacgccagtaacttcagattcctgacctttgagcataccacgacgacggctcaagtcaccgataacgtcaccggtgttctcttccggagtttctacttcaaccttcatgatcggctcaagcagaactggtttcgctttcttaaagccttctttaaaggcgatagaagcagccagtttaaacgccagttcagaggagtcaacgtcatggtaagaaccgaagtgcagacgaatacccatgtctactaccgggtagcctgccagcggacctgctttcagctgttcctggatacctttatcaacggccgggatgtattcgccagggattacaccacctttaatgtcgttgatgaactcgtagcctttcgggttactacccggctccagcgggtacatgtcgataacaacatgaccatactgaccacgaccaccagactgtttcgcgtgtttaccttcaacatcggtaactttctggcggatagtttcacggtaagcaacctgcggtttacctacgttcgcttcaacgttgaattcacgcttcatacggtcaacgatgatgtcgaggtgcagttcgcccatacccgcgatgatggtctggttagattcttcgtcagtccatacacggaaagacgggtcttctttagccagacggcccagagccagacccattttttcctggtcagctttggttttcggttcaactgcgatggagattaccggctcagggaattccatacgttccagaatgatcggcgcatccgggtcacacagggtgtcaccagtggttacgtctttcagaccgatagcagcagcgatgtcgcccgcgcgaacttctttgatctcttcacgtttgttagcgtgcatctgaacgatacgaccgaaacgctcacgtgcagctttcacggagttcagtacggtatcaccagagttaaccacaccggagtaaacacggaagaaggtcaggttaccaacaaacgggtcggtagcgattttgaacgccagtgcagagaacggctcgtcatcacttgcgtgacgttcagccggagtgtctttaccgtcgtccaggataccgttgatcgcaggtacgtcaaccggggatggcaggtaatcaattaccgcatccagcatcgcctgaacacctttgttcttgaacgcagaaccacaggttaccaggatgatttcgttgttcagaacgcgctgacgcagagcacctttgatttctgcttcagtcagttcttcaccacccaggtatttttccatcagctcttcagaagcttcagctgcggattcgatcaggttctggtgccattcgttagccagttcaaccatgtctgccgggatatcttcgtattcgaaggttacgccctggtcagcgtcgttccagttgatagctttcattttcaccaggtcaacaacaccggtgaaatgttcttcagcaccaatcgccagctgcagcggaaccgggttcgcgcccagacgggttttgatctggttaacaactttcaggaagttcgcacccatgcggtccattttgttaacgaacgcaatgcgcggaactttatatttgtttgcctgacgccatacggtttcagactgcggctgaacaccaccaactgcgcagtaaaccattaccgcaccatcgagaacacgcatggaacgttctacttcgattgtgaagtcaacgtgccccggggtgtcgatgatgttgatgcgatgcggctcatactgcttagccataccagaccagaatgcagtagtcgcagcggaagtgatggtaataccacgttcctgctcctgctccatccagtccatggttgcagcgccgtcatgaacttcaccgattttatggtttacaccggtgtagaacagaatacgttcggtagtagtggttttaccggcgtcgatgtgcgcactgataccgatgttacggtagcgtgcgatgggtgttgtacgagccatttgtttcctcgtttatcttttaggcgttcaatttaagtagcccaaagcgggctgcttactggaagcgcccgcctggtgactaaaactccgaagggataaccaacggtagtgtgcgaacgccttgttggcttcggccatacggtgaacgtcttcacgtttcttaactgcagtacctttgttttctgcagcatcagaaagttcgttcgccaggcgcagagccatggatttatcaccgcgtttacgagcagcttcaacgatccaacgcattgccagagcattacgacgaaccggacggacttcaactggtacctgataagtagaaccaccaacgcggcgagacttaacttctacagtcgggcgcacgttttcgagagctacttcgaatgcttccagttcagatttaccagagcgctgagccagggtctccagcgcgctgtatacgatagattcagcagtagattttttaccatctaccatcaggatatttacaaatttagccagcagttcacttccgaacttcggatccggcagaattttacgctgaccaatgacgcgacgacgtggcatggaaatactccgttgttaattcaggattgtccaaaactctacgagtttagtttgacatttaagttaaaacgtttggccttacttaacggagaaccattaagccttaggacgcttcacgccatacttggaacgagcctgcttacggtctttaacgccggagcagtcaagcgcaccacgtacggtgtggtaacgaacacccgggaggtctttaacacgaccgccacggatcaggatcacggagtgctcctgcaggttgtgaccttcaccaccgatgtaggaagtcacttcgaaaccgttagtcagacgaacacggcatactttacgcagcgcggagttcggtttacgaggagtggtagtatatacacgagtacatacgccacgtttttgcgggcatgcttccagcgcaggcacgttgcttttcgcaactttgcgagcacgtggtttgcgtaccagctggttaactgttgccattaaatagctcctggttttagcttttgcttcgtaaacacgtaataaaacgtcctcacacaatatgaggacgccgaattttagggcgatgccgaaaaggtgtcaagaaatatacaacgatcccgccatcaccaggccatctggctggggtgcttaaccgtaagtctgacgaaatcagtatagtcaatgagaatgatgtcgttgctaatttgaccagtcaaaccgcgggcaataaggtcttcgttcagggcatagaccttaatgggggcattacgcagactttcaaggtagcggttaccgtcaactgcggcagttacgccatcttgcaataatagcagttcgtctccttcactgagcagacgcagcagcgcagcaaaatccgtcagccagggactgcgatgtaatgtgtgcagcataaacgcctcaaaacctcaaaataacatcgtagttggcgagttcgcggcgtaaggcatctgcttcgagcggcgtggcttcgacaacaaagggtgtctgcggatctaacccgcgttcgcgcagactagccgcacaaacccagcactgttcaatgtcgtacagacccaacaatttaaaagtggcaatgtaatcacgcgccagcactgcatcgggcttttgtcctggcagcagctgaaaaacgccatcagctataaagaagacagccagatcgtcagttaatgcggaagttgccagtaaagcatctaaaccttcccggcctgcggctgtaccatgaggtgcagtagaaaaaacaaacgcaattcgtttcatcagaactgtaccaccctgtcacaggtcaggctggcttccgccagcgccccaagtccgcttaaggtaaatccctgctgaaggttactgctagccagccccagtcttccggcctccgtttcatcaacaacgccacggcgtaatgctgccgctacgcagatattcagcgccacaccatgttgcgcattcagttgttgccaggcccgtacgaggtcaaattcgtcacttgccggagaggtcaattggttagcgttatagaccccttcccgatagaaaaagacgctgcttaactcatggccatctgctatcagcgcctgcgcaaactgaaaagcactactcgcctgttgcgtaccgtatgctggcccggtcaccacgatggcaaaacgcattacttatcttgcccctggaaatcaccgctcttgaactggcggatgtagagatagacagtgtgtttggagatgttcaggcggtcagcaacctggttgatcgcatctttaatatcgaagatccctttctcgtagagattcagcacgatctgacgatttttggcgttattagaaacattgcgatcggcattcacttcttcgatggtgaactccagcgtttgggtaaccagatcttcaacagaagaggcaaagttgacgctactaccgacatccggggtttctggcggcacaaaggtgctcataatctggctgaagggaacatcaagattcatattgatgcacagcagaccaattacacgctgttcgcggttacgaatcgcgatagtcagggacttcattaatacgccgcttttggcgcgagtaaagtagcatttagaaacgctgctatccgctcccgtcatatcgtgcagcatacgtagcgccaggtcagtaattgggctaccaatcttccggcctgtatgttcaccgttagcaatgcgaatggcactacattttagatcctgcaaagagtgcaaaacgatttcacagtgggagccaataagcatcgctaacccgtccaccaccgcttcgtaggatttcagaatatcaaaatcggtctggtcgaaaggacgttgatccagtaaatccaactcactggtttcgttggttaaaaggctcctggacatgaaaaaaaacactccttttcaggagcctgtcgttaacttttcagggcaggctcattaatgatgcgggtaactaaattaatacagcggaggttccgctttccagcactaattatatccggcctgtaataaaaaaaccgccgcctggtcaggcggcggttcttaatgcttattttttagcagaatctgcggctttcgcatcagcttccggctttgcatcagccttcggcgctggtttcacatccagcagctctacgtcaaacaccagggtagaattcggtgggatccccggaacacccgctttgccgtaagccagttctggtggaataaccagtttgatcttaccgcctttcttgatgttcttcagaccttctgtccaacccgggataacaccgtccagacggaaagaaagcggttcaccacgggtgtaagagttgtcgaactctttaccgtcgatcagcgtacctttgtagttcactacaacagtatcgctgtctttcggtgcttcgcctttaccggcttctactacctgataaaccagaccagtactagaggttttcacacctttctctttggcaaatttctcgcggtactctttaccttttgcttcgttatcagccgcgtctttttccatcttcgcctgagcagaagacttcacgcgagcttcgaatgcttgtagagtctgttcgatctcttggtcggagagtttgcttttatcagcaaatgcatcctgaacaccagcgatcagctgatctttatccagtttgatgcccagtttttcttgttcttttagagagttttccatgtaacgacccaggctggcacccagtgcataagcacttttctgatcgtcatttttgaacgctgctttgctgtcagcagctgtagcaggttttgcagcttcagcagcaaaagtgattggtgcatgcagggcaacggccattgtggtcgccagcagcgttactttaaacagacttttcatccatatctccaggatcggggcatctcaccccagggttaactattatcagaagggtactataaagcgttgtcgaacaaatctacatacagacacgccctattatcatctattttcagactctttttgtttaaattagtttcgatgaccgcgaaatgagtgctgtctcgggcagcaaagttaagtagaatccgcggcgaccattcgacaaaagaggtgaatcatgcaggatttaagtttggaagcacgcctggcagagctggagagccgactggcttttcaggaaatcaccattgaagaactgaacgtcacggtgaccgctcatgaaatggagatggcgaaactgcgcgatcatctgcgtctgctgaccgagaagttaaaagccagccagccgagcaacatcgcgagccaggctgaagaaacgccaccgccacattattgaggcgtaaaaaaagcggggattccccgcttttttgtcactttttcggtattagtggcaaccgcaaccgccgttgcctttaccgccacagcagccttcgccaccgtgttcatgaccgtgatcgtggccatgaccgccgcagcaaccgtcgtggtcgtgatcgtggtggtgatcgtgcgcgccgtgaacgtgaccatgagccagttcttcttcagtcgcttcgcgaatcgccacaacttcaacgttgaatttcaggttctgaccggccagcatgtggttaccatcaaccacgacgtgatcgtcttcaaccgcagtgatttcaaccggtaccggaccctggtcggtttcagccaggaaacgcatacctacctgcagttcatcaacgcccataaatacgtctttaggaacacgttgcaccaggttttcgtcgtactgaccgtaagcgtcgttcgcgccaacagcgacatcaaatttgtcgccaacttcatgaccttccagcgccgtttccaggccagagatcagggaaccgtgaccatgcaggtagtccagcggcgcactcaccggagactcatcaaccaacacaccgtcttctgtacgtacctgataggccaggctgaccaccaggtcttttgctactttcatgatatctcctgagcatgggaagaatagtggcgcagattgtagcggaattctgcagccgtgtactcactagcttaaaaaaactcggcgcatatcgttagtccggatgaaaaatcccgatcacttgctcatctttgcgaacgtgatcgcgggcttctttgtctgcttctcgcatctgatgtccgcacttaacacattcaacaatatcaatattattttcgcgccacatcgccatactatcctgcgcctgacaggccgggcattttgcgcccgcaataaaacgttttcggattgccatctttaccctttactcaaattcatcccagccgtccagctggcgtcgttcttgttgcatttcacgctggaaaatctcttccagttcgcgtcgggcttccctggcgcgagaaatttgtacggtatcggcatgcattgggatgagctctcgcagcatccgcatatccaggcggcgaaaatgcagttgcgctcgctgtgcctgatgcggatgcatgccaagcgtgaccagcgtcttgcgccccagctctaacgcactggagaatgtttcacgggaaaactgcgtcacccctgcctgtaataactcatgcgcttccacacgtccgcgcgctcgcgcaagaatatgcaaatgcggaaagtgctgttggcatatttccaccagcttcatggtgtcttccggctcgttacaggtaatgacgatagactcagcggcctctgcacccgcagaacgtaaaagatcgacctgcgtggcgtcgccgtaataaactttgtagccgtatttacgcatcaggttaacggcgctgatatcccgctccagcacggtaatgcgcattttatttgccatcagcaaacgaccaatcacctgaccaaaacgcccgaagcccacgacaatgacctggggtttatcatcgttgacccacggtttttcgtcttcttcttccggtccgttaaactggcgggatagccatttatccaccagcttcatcagcaacggcgtggtcatcatggaaagcgtcaccgtcaccagcaacaacgccatctggtcgccctggaataagcgttgactagaagcggtagaaaagaggacaaaggcaaactcaccaccctgactcaacacgccagcaaactgcatccgctcactgctacgcacgccatacaatcgcgccagcagatacagcacgagaattttcaccgccaccagcacaaccacgcttatcactacccacaacagatgggtataaagcaccccgaggttgagactcatgccgacagagataaagaacaaaccgagcagcaagcctttgaagggatcgatagccgtttccagttcatggcgatattcactttccgccagcagcacgcccgcaataaatgtaccgagcgccatgctcagccccagcgcatccataaacaatgcggaacccaacaccagcagcagcgtcgcggcggtgaacacttcccgcacgccagaagctgcaataaagcggaataccggacgcagtaaatagcgcccaccaatcagcatgccgacaaacgccagcaccttcatgccgaccttcatccagtcgaaatgttcgtctgcgctccccgccaacaacggcactaacgccagtgctgggattactgccagatcctgaaacagcagaacgctaaacccgagctggccggattcgctgcgattcatccctttctcacgcatcaattgcaacgccattgcagtactagacatcgcaaggccaatgccaccgaccaccgccgcctgccaggcgaaatccgtcagcatcaataatcccgccagcaacgccgcgcttaacagcacctgtgccgcgcctacgccaaaaatgctacgccgcagttgccaaagtttggagggattcaactcaaggccgatgataaacatcaggaataccacgccgagttcgctaaagtggaggatctcatcgacgtcgctaataaaccccagcccccacgggccaattgcaatccctgccagcaaatatcccaacacagcgccaatacccagccggcttgccagcggcaccgcagccaccgccgcgaagagaaacagcactcctgcgagtaaaaaatcggaaccttccatcagcggcctcctggagacagcggatttgccagccagtcaccgtaggctctggcgtggctcgccagctcctgtgcgctttgccgtctcgcccagtaaataatgatgggacttaaccaatgcatccggcacatgcccgccgccagttcaaaggggcgcagcacatcgctcatcgggtagcgattcagcgcgtcataacggtaagcactttccggctcgccggtggtaatcacgctacgccagtactttcccgccagttggtttcctcccggcccgctggcaaaaccacgacttaatacccggtccagccactctttcagtagcgccgggcagctataggtataaagaggatgctgaaagacaatcacctcgtgctcgcgcagtaatgcctgctcacgggggatatcaataaaaaaatcgggatagtgcgcgtaaaggtcgtgcacggtaacattgctgagctgcgtggccggtttaagcagtacccggtttgccacgctgtcctgagattccggatgggcatacagcagcaaaactttcgctggctgagacatcatccccctcccggtatggtttttgtgtatagtcgctgttttgggctaccattgcgcccggtgcggcagctcgcccatacattacattatcataatgataagttaacatagtctgaacatacggcaccttatgattgttttctccagcttacaaattcgtcgcggcgtgcgcgtcctgctggataatgccaccgccaccatcaaccctgggcagaaagtcggcctggtgggtaaaaacggctgtggtaaatctaccctgctggcattgctgaaaaatgaaatcagcgccgacggcggcagctacacctttccgggaagctggcaactggcgtgggtgaatcaggaaacgccggcgttaccgcaagcggcgctggaatatgtcattgacggcgaccgtgaatatcgtcaactagaagcgcagctacacgacgccaacgaacgtaacgacgggcacgccattgcgaccattcatggcaagctggatgctattgacgcatggagtattcgctcccgtgctgccagcctgctgcacggcctcggtttcagcaatgaacaactggagcgcccggtaagtgatttttccgggggctggcgtatgcgtcttaaccttgcccaggcgctgatttgccgtagtgacttgctgctgctcgacgaaccgactaaccacctcgatctcgatgccgttatctggctggaaaaatggctgaagagctatcagggcacgctgatcctgatctctcacgaccgcgacttcctcgatccgatcgtcgataaaattattcatatcgaacaacaaagcatgttcgagtacaccggcaactacagtagctttgaagtacagcgcgccacccgtctggcgcagcaacaagcgatgtacgaaagccagcaggaacgcgtagcgcatctgcaaagttatatcgaccgtttccgtgccaaagccaccaaagcgaagcaggcccagagccgcattaagatgctcgagcgtatggagctaattgcccccgcgcacgtcgacaacccgttccgctttagcttccgcgcgccggaaagcctgccaaatccgttactgaagatggaaaaagtcagcgcgggctatggcgatcgcattattctcgacagcattaaactgaacctggtgcccggcagccgtattggtctgttaggccgcaatggcgcgggtaaaagcacattaatcaaactgttagccggtgaacttgcgccagtcagcggtgaaattggtctggcgaaagggatcaaactcggctacttcgcccagcatcaacttgaatacctgcgcgccgacgaaagtcctattcaacatctggcacgtttagcgccgcaggagctggaacaaaaactgcgtgactacctcggcggctttggtttccagggcgataaagtaaccgaagaaacgcgccgcttctccggtggggaaaaagcccgcctggtgctggcattaattgtctggcagcggccgaatctgctgctgctcgacgaaccgactaaccaccttgacctcgacatgcgtcaggcactcaccgaagcattaatcgagtttgaaggcgcgctggttgtcgttagccacgaccgtcatttgctgcgttccaccactgacgatctctacctggttcacgatcgtaaagtcgaaccgttcgacggcgatctggaagattatcaacagtggttgagcgacgtacaaaagcaggaaaaccagaccgacgaagcgccaaaagagaatgcgaacagcgcccaggcacgtaaagatcagaagcgtcgggaagctgagctgcgtgcgcaaacccagccactgcgtaaagagattgcccgtctggaaaaagagatggagaagctgaacgcgcaactggcgcaggcggaagagaaactcggcgacagcgaactgtatgaccagagccgtaaagcggagttgaccgcctgcctgcaacagcaagccagcgccaaatccggcctggaagagtgcgaaatggcatggctggaagcccaggagcagcttgagcagatgctgctggaaggccaaagcaactgatggcgcagataacgacgaccgatgccaatgaattcagcagcagtgctgaattcatccccatgcgcggctttagcaattgtcatctgcaaaccatgctgccgcgtctgtttcgtcgtcaggtgaaattcaccccgtactggcagcggctggagttgcccgacggcgattttgtcgatcttgcgtggagtgaaaaccctgcacaggcgcaacataaacctcgtctggtggtgtttcacgggctggaaggcagtctcaacagcccttacgcccacggtctggttgaggcggcgcaaaagcgcggctggctgggcgtggtgatgcattttcgcggatgcagcggtgaaccaaaccgtatgcaccgcatttaccatagcggcgaaaccgaagacgccagttggtttttacgctggctgcaacgcgaatttggtcatgcgccaacggctgccgtcggctatagcctcggcggtaatatgctggcctgtttgctggcaaaggaaggcaatgatctcccggttgatgcggcggtgattgtctctgcgccgtttatgctggaagcctgtagctatcatatggaaaagggcttttcccgcgtttatcagcgttacttgctgaacctgttaaaagccaatgccgcgcgcaagctggcagcctaccccggaacgctgccgattaatctcgcgcagttaaaaagcgtacgtcgcatccgtgaatttgacgatctcatcaccgccagaattcacggctacgccgacgctatcgactattatcgtcagtgtagcgccatgccgatgctgaaccggatcgccaaaccgacgctgattattcacgccaaagacgatccgtttatggatcatcaggtgatcccgaaaccggaaagtctccccccgcaggtggagtatcaactgactgaacatggcggtcatgttggctttattggcggtacattacttcatccgcaaatgtggctggagagtcgcattcctgactggttaacaacgtatctggaggcgaaaagttgttgatattaacgtatctggaggcgaaatcatgttgattccgtggcaagacctctcccccgaaacgctggaaaatttaattgaaagctttgtgttacgtgaaggcaccgattatggtgaacatgagcgtacacttgaacagaaagtcgccgacgtcaaacgccagctacagtgcggagaagcggtgctggtatggagcgagctgcacgaaacggtcaatattatgccgcgcagtcagtttcgcgaataacctgcaaccgtcggcggacgagataataatgatagctaagtcatggagttactatgtctgccaaacatccggtcattgcggtaacaggatccagcggcgcggggaccaccaccaccagcctcgcgtttcgtaaaatattcgcgcagttaaatctgcatgcagctgaggtggaaggcgacagttttcaccgttacacccgcccggaaatggacatggcgatccgcaaagcgcgcgacgccgggcggcatatcagctacttcggccccgaggctaacgacttcggcctgctggaacaaaccttcattgaatacggtcagagcggcaaagggaaatctcgcaaatatctgcatacctacgacgaagccgtaccgtggaatcaggtaccggggacattcaccccctggcaacctttaccggaacccactgatgtactgttttatgaaggtttacacggcggcgtagtcacgccacagcataacgttgcgcagcatgtggacttactggtcggcgtggtgcctatcgttaaccttgagtggattcaaaaactgatccgcgacaccagcgagcgcgggcacagtcgagaagcagtgatggacagtgtagtgcgtagtatggaagactatatcaactacatcacaccgcagttttcccgcacccatcttaacttccagcgcgttcccaccgtcgacactagtaacccgttcgcggcaaaaggtatcccgagcctcgatgaaagctttgtggtgatccattttcgtaatctggaagggatcgatttcccctggctgctggcgatgttgcaaggcagtttcatttcccacatcaatacgttagtggtaccgggcggcaaaatgggtctggcaatggaattaattatgctgccgctggtgcaacgattgatggaaggaaagaaaatcgagtaactctgctattacgccggataaaatactatccggcttcacaacgggatagttaagtcacgcggcaaccacttcatagctgtgagtaatattcaccgctttttccagcatcaacgccacactacaatatttctcggcagagagatcaaccgcacgcgcaaccgctgcgtctttcaggtcgcgaccggtgacgataaaatgcagattaatgtgcgtaaacaggcgtggtgcctcttcgcggcgttcagaggtcaattttacttcacaatcgaccacatcctgacgccctttttgcaggatgctaaccacatcgatggcactgcaaccacccgccgccatcaacaccatttccatcggacttggtgctttatcgccactgttgccgtccattaaaatctgatgaccagaggcggattcgcccagaaaagttaacccttcgacccacttcactcgcgcttgcatttttgctactccactgcgtcaattttcctgacagagtacgcgtactaaccaaatcgcgcaacggaaggcgacctgggtcatgctgaagcgagacaccaggagacacaaagcgaaagctatgctaaaacagtcaggatgctacagtaatacattgatgtactgcatgtatgcaaaggacgtcacattaccgtgcagtacagttgatagccccttcccaggtagcgggaagcatatttcggcaatccagagacagcggcgttatctggctctggagaaagcttataacagaggataaccgcgcatggtgcttggcaaaccgcaaacagacccgactctcgaatggttcttgtctcattgccacattcataagtacccatccaagagcacgcttattcaccagggtgaaaaagcggaaacgctgtactacatcgttaaaggctctgtggcagtgctgatcaaagacgaagagggtaaagaaatgatcctctcctatctgaatcagggtgattttattggcgaactgggcctgtttgaagagggccaggaacgtagcgcatgggtacgtgcgaaaaccgcctgtgaagtggctgaaattagctacaaaaaatttcgccaattgattcaggtaaacccggacattctgatgcgtttgtctgcacagatggcgcgtcgtctgcaagtcactagtgagaaagtgggcaacctggcgttcctcgacgtgacgggccgcattgcacagactctgctgaatctggcaaaacaaccagacgctatgactcacccggacggtatgcaaatcaaaattacccgtcaggaaattggtcagattgtcggctgttctcgtgaaaccgtgggacgcattctgaagatgctggaagatcagaacctgatctccgcacacggtaaaaccatcgtcgtttacggcactcgttaatcccgtcggagtggcgcgttacctggtagcgcgccattttgtttcccccgatgtggcgcagactgatttatcaccccgatatcaactatgcacttcgacaaacgctggtgctatgtttgcccgtggccgttgggttaatgcttggcgaattacgattcggtctgctcttctccctcgttcctgcctgttgcaatattgcgggccttgatacgcctcataaacgttttttcaaacgcttaatcattggtgcgagcctgtttgccacctgtagcttgctgacacagctactactggcaaaagatgttcccctgccctttttgctgaccggattaacgctggtacttggcgtcactgctgagctggggccattgcacgcaaaattgcttcctgcaagcctgctcgccgccatttttaccctcagtttggcgggatacatgccggtctgggaaccgttgctcatctatgcgttgggcactctctggtacggattgtttaactggttttggttctggatctggcgcgaacaaccgctgcgcgagagtctaagtctgctgtaccgtgaactggcagattattgtgaagccaaatacagcctgcttacccagcacaccgaccctgaaaaagcgctgccgccgctgctggtgcgccagcaaaaagcggtcgatctaattacccagtgctatcagcaaatgcatatgctttccgcgcaaaataatactgactacaagcggatgctgcgtattttccaggaggcgctggatttacaggaacatattagcgtcagtttgcatcagccggaagaggtgcaaaagctggtcgagcgtagccatgcggaagaagttatccgctggaatgcgcaaaccgtcgccgctcgcctgcgcgtgctggctgatgacattctttaccatcgcctgccaacgcgttttacgatggaaaagcaaattggcgcactggaaaaaatcgcccgccagcatccggataatccggttgggcaattctgctactggcatttcagccgcatcgcccgcgtgctgcgcacccaaaaaccgctctatgcccgtgacttactggccgataaacagcggcgaatgccattacttccggcgctgaaaagttatctgagtctaaagtctccggcgctacgcaatgccggacgactcagtgtgatgttaagcgttgccagcctgatgggcaccgcgctgcatctgccgaagagctactggatcctgatgacggtattgctggtgacacaaaatggctatggcgcaacccgtctgaggattgtgaatcgctccgtgggaaccgtggtcgggttaatcattgcgggcgtggcgctgcactttaaaattcccgaaggttacaccctgacgttgatgctgattaccaccctcgccagctacctgatattgcgcaaaaactacggctgggcgacggtcggttttactattaccgcagtgtataccctgcaactattgtggttgaacggcgagcaatacatccttccgcgtcttatcgataccattattggttgtttaattgctttcggcggtactgtctggctgtggccgcagtggcagagcgggttattgcgtaaaaacgcccatgatgctttagaagcctatcaggaagcgattcgcttgattcttagcgaggatccgcaacctacgccactggcctggcagcgaatgcgggtaaatcaggcacataacactctgtataacagtttgaatcaggcgatgcaggaaccggcgtttaacagccattatctggcagatatgaaactgtgggtaacgcacagccagtttattgttgagcatattaatgccatgaccacgctggcgcgggaacaccgggcattgccacctgaactggcacaagagtatttacagtcttgtgaaatcgccattcagcgttgtcagcagcgactggagtatgacgaaccgggtagttctggcgatgccaatatcatggatgcgccggagatgcagccgcacgaaggcgcggcaggtacgctggagcagcatttacagcgggttattggtcatctgaacaccatgcacaccattagcagcatggcatggcgtcagcgaccgcatcacgggatttggctgagtcgcaagttgcgggatagcaaggcgtaatgcaggctaaaccatcggataaggcattcacgccgcatccgacatcttttgcctgatgcttcgtatttacgccccaaccaccttcgccaccgcgtgggcgaaacgttgcatcccttcatcgatatccgcatcttccaccaccaggctcggtgcaaaacgcatcacatccggtccggcattcagcaccattacgccagcctctgcgcccgcatacaggaaatcacgcgcccgacctttgtactgtggtttcagctctgcgccaatcaacagccccataccgcgaatatcgctaaatacatcgtactgctgatcgatcttctgcagatggtcaacaaaacgctggcgtttcgcctgaatgccttccagcacttcaggggtattgatgatatcaaacgccgcccccgctactgcacaggccagaggattaccgccgtaggtggaaccgtgagaaccaggatgaaacgcagaagcaatttccgccgtggtcagcatggcgctaatcgggaagccgccgcctaacgctttcgcagaggtcagaatatccggcgtaacgccgtagtgcatgtaagcaaacaaatcgccggtccgccccatcccgcactgcacttcatcaaacaccaataatgcctgatgttgatcgcacagctcgcgcaagccctgcaaaaactctggcgtcgctgccgtcacaccgccctcgccctggatcggctcaaccaccaccgcacaggtgtgatcatccatcaccgctttcactgcatggagatcgttaaagggaacgtggatgatgtctgccggtttcggcccaaagccgtcggaatattttggctgcccacccacgctaacggtaaacaggctgcgaccatgaaaagcgttatggaaggcaataattttggttttgaacgggctatgacgcacacaggcgtaatggcgtgccagtttaaaggcggtttcgttagcttccgtgccggagttcataaacaccacgcgttcggcaaacgttgcctcaatcagtttacgcccaagacgcagcgccggttcattggtgaaaacgttactgatatgccacagagtttcgccctgggtttttaacgcgttcaccagcgcaggatggcaatggcccaacgccgtaactgcaatgccacccgcgaaatcgacatactccttgccttgctgatcccagattcggctgccctgaccttttaccggaataaactctgccggagcataaatcggcaggatcacttcatcgaaagtcgcgcgtgtaattgctgtttgttcaattgccatctcatgatcaccctgttacgcataaacaaatgtgaaattataaccacaaaatatgcataaaaaatcactaaatggcaatcagaaatcagcgatgcaggaaattagccagcagttgatgtccttgttcgctaagaatactttctggatggaactgcacaccttccagatcccactggcgatggcgaatccccataatctctcgggtttcgctccaggccgtcacgtcaaagcacgctggtaaactgtcaggttccaccaccaggctatggtagcgtgtcacggtaagtggatttgccagcccccgaaatacgccctcaccgttatgtgtaatcgggctggttttgccgtgcatgacctttgcggcgcgcacaactttaccgccaaatgcctgcgccattgcctgatgaccgaggcagacgccaagaatcggcaagcgcccggcatagtggcgaataacgtcaagggagatcccggcttcatctggcgtacaggggccaggactgatgacaattttttgtggtttaagggcgtcgatatccgccagcgtcaacgcatcgttgcgcttaaccagcacatccgcccccagttcacaaaagtactggtagaggttccaggtaaaagaatcgtagttatctataagcaggatcatggcggctccggtacaaaagaaccgcgctattttactcagattccccggcttcgcttaccactttgctaaatatcatctgcagtgcggtgagatcccccattgccccactctgatttgcctgattccaggcctctttttcgataccctgccagctcagttgatatccggcatgaatcgccagttgctcgaagaagatccgctgtgccagaccacttcccacccggaagggatgcagcacgttgatttcacaatagtaatgcgccagccgctcgacgaacttcgctttctccaggccaaccagataaccttcttcctccagatcctgcatcagggcattgccctctttttcgatataagcaaagtggcagaacggcgtatcaccctgataaatatcaacttcacgcagttgccctgcccagtcgaaaatatcctgatacagctggcgatggatagttcgcaaatgcggtaaaccgcgcaccagcggaccaagctcaatggtcgcagcacgcagcgccgtcatttcgtaagcggcctgttccagccgctgctgctggcggatgttcagccggttacgcatgatatcaaggcctggataaagatacggatcgcgcccttcgccgaatttatcgctcatagtgactcctcagctcttcaaggcgcgctaaagcctctgcggcagtaagagtgactaaaggcatctcgacgccttcaagacggcgactggcctgaaaattacgattacgctgaagctcccagagacgggacttttgcttatcggtgagtttcttcacttgatgcctccctgaacgtgtccatttgccacaagtataagcggcaaatccgggttacgccgggagagcagaagcgcgggcaagattgcccgcgcgagaaatcattacggcaggactttagcggaaaggataactaccggtttactcggcacattctggtacggaccaacgtcatgagtcggcacctgggaaatcttatcggcaacgtccatgcctttcaccactttaccaaataccgcgtaaccgaaatcacgctgaccatggtcaaggaaggcgttatcggcaacgttgataaagaactggctggtggcgctgtctttgtcagcggtacgtgccatcgcgatggtgccacgcgtgttgcgcaggccgttatcggcttcatttttgattggcgggtttggttttttctgctgcatctgctcggtgaaaccgccgccctgaatcataaagccaggaatgacgcggtgaaaggtagtgttgttataaaaaccgctgttcacataatcgacaaagttttgcacagacactggcgctttttgtttatccagctccagttcgatgttaccagcactggttgtcaacaatacgtgcgggtcccctttcgctgccattgctgcgggagaaagagcagaaagagcgaaaacagcagccatcgccgccagggtgcttttgaacatgagatttccttaacaaacagagcagaaaaaaagcaagtgaagagattctaaatagccttcaagaacaaggccatccctttacctaattttacgtatctgaaatatatgtaacctgacgatcactttttattccgtgatcaaaatcacctcttaaaatgcaatttagcaaccgattgcaataaaacatttaaacagatcacaaaatcacctaaaatcgcccgctcgcggcatatcccgctatgccattttatttttgaacgcaggccaatcatgactaacagcaatcgcatcaagctcacatggattagctttctctcctacgcactgactggtgcgttggttattgtcaccgggatggtgatgggaaatatcgccgattatttcaatctgcctgtttccagtatgagtaataccttcaccttcctcaacgccggcattttaatctctatcttcctcaacgcctggctgatggaaatcgtcccgttgaaaacgcagttacgttttggctttctcctgatggtgctggcggttgccggtttgatgttcagccacagcctggcgctgttcagcgcggcgatgttcattctcggggtggtcagcggcatcaccatgagcattggtacattcctggtaacacaaatgtatgaagggcgtcagcgcggttcccgcctgttatttaccgactccttcttcagtatggctgggatgattttcccaatgatcgccgcgtttctactggcgcgcagcattgagtggtactgggtttatgcctgcatcgggctggtgtatgtcgctatttttattctgaccttcggctgtgagttcccggcgctgggcaaacatgcgccaaaaacggatgctccggtagagaaagaaaagtgggggatcggcgtactgtttctctctgttgcggcgttgtgctacatcctcggtcagttaggttttatctcctgggtgcctgagtatgccaaaggcctgggcatgagcctgaacgacgcgggcacgctggtgagtaacttctggatgagttacatggtcggcatgtgggcgttcagctttattcttcgcttctttgatttgcaacgcattctgaccgtactggctggtctggctgcgattctgatgtacgtctttaacaccggaacaccagcacatatggcgtggagtattctcgctctgggcttcttctccagcgcgatctataccaccatcatcaccctgggtagtcagcagaccaaagtaccgagcccaaaactggttaactttgtcctgacctgcggaaccatcggtactatgttgacctttgtggttaccggcccgatcgttgaacatagcggtccgcaggcggcactgcttacagcaaacggtctgtacgctgtcgtctttgtgatgtgcttcctgttaggtttcgtcagccgtcaccgtcagcataacaccctgacctctcattaattgctcatgccggacggcactatcgtcgtccggccttttcctctcttcccccgctacgtgcatctatttctataaacccgctcattttgtctattttttgcacaaacatgaaatatcagacaattccgtgacttaagaaaatttatacaaatcagcaatatacccattaaggagtatataaaggtgaatttgatttacatcaataagcggggttgctgaatcgttaaggtaggcggtaatagaaaagaaatcgaggcaaaaatgagcaaagtcagactcgcaattatcggtaacggtatggtcggccatcgctttatcgaagatcttcttgataaatctgatgcggccaactttgatattaccgttttctgtgaagaaccgcgcatcgcttatgaccgcgtacacctcagctcttacttctctcaccacaccgccgaagagctgagcctggtgcgcgaaggcttctacgagaaacacggcatcaaagttctggtcggcgaacgcgctatcaccatcaaccgtcaggagaaggtgattcactccagcgccggacgtaccgttttttatgacaagctgatcatggcaaccggttcctacccgtggatcccgccaatcaaaggttctgatactcaggactgctttgtctatcgcactattgaagacctcaacgccattgaatcctgcgcccgtcgcagcaaacgcggtgccgttgttggtggcggcctgttaggtctggaagccgcaggcgcgctgaaaaacttaggtattgaaacccacgttatcgaatttgcccctatgctgatggcagaacagcttgatcagatgggcggcgagcagctgcgtcgcaaaatcgaaagtatgggcgtgcgcgttcacaccagcaaaaacacccttgagattgtgcaggaaggtgttgaagcgcgtaaaaccatgcgttttgccgacggcagcgaactggaagtcgactttatcgtcttctctaccggtatccgtccgcgcgataagctggcaacccagtgtggtctggacgttgctccgcgtgggggtattgtcattaatgattcctgccagacttccgatccggatatctacgccatcggtgaatgcgcaagctggaacaaccgtgtatttggtctggtagcacctggctacaaaatggcgcaggtcgccgttgaccatattctcggtagcgaaaacgcctttgaaggtgctgaccttagcgccaagctgaaactgctgggcgtagacgtaggcggtattggtgatgcgcacggtcgcacgcctggcgcacgtagctacgtttacctcgacgaaagtaaagagatctacaaacgcctgattgtcagcgaagacaacaaaaccctgctcggtgcggtactggtgggcgataccagcgactacggtaacctgctgcaactggtgctgaacgctatcgaactgccggaaaacccggattccctgatcctgccagcacacagcggtagcggcaagccgtctatcggtgttgataaactgccggacagcgcgcaaatctgctcctgcttcgacgtcaccaaaggtgatctgattgctgccatcaacaaaggctgccacacagttgcggcgctgaaagctgaaaccaaagcgggtactggctgcggtggctgtatcccgctggtcactcaggtactgaacgcggaactggcgaaacagggcatcgaagttaacaacaacctgtgcgaacactttgcttatagccgtcaggaactgttccatttgatccgcgttgaaggcattaaaaccttcgaagaactgctggcgaaacacggcaaaggctacggttgtgaagtttgtaaaccaaccgtcggtagcctgctggcctcctgctggaacgaatacattctgaagccggaacatactccgctgcaggattctaacgacaacttcctcgctaacatccagaaagacggcacctacagcgtgatcccgcgttctccgggcggtgaaatcaccccggaagggctgatggcggtaggtcgtatcgcgcgtgaatttaatctctacaccaagatcactggctcccagcgtctggcgatgtttggcgcacagaaagacgatctgccggagatctggcgtcagctgattgaagccggcttcgaaaccggtcatgcctatgcgaaagcactgcgtatggcgaaaacctgcgtgggtagcacctggtgccgctacggcgttggcgacagcgtcggcctcggcgtggaactggaaaaccgctacaaaggcatccgtacgccgcacaaaatgaagttcggtgtctccggctgtacccgtgaatgtagtgaagctcagggtaaagacgtgggtattatcgccactgaaaaaggctggaacctgtatgtttgcggtaacggcggcatgaaaccgcgtcatgcggatctgctggcggcggatatcgatcgcgaaacgctgatcaaatatctcgaccgcttcatgatgttctacatccgtactgccgacaaactgacgcgtaccgcaccgtggttagaaaacctcgaaggcggcatcgattacctgaaagcagtgatcattgacgacaaactggggctgaacgcacatctggaagaagagatggcgcgcctgcgtgaagcggtactgtgtgagtggactgaaacggtcaatacgccgtctgcgcagactcgcttcaaacacttcatcaacagcgacaagcgtgacccgaacgtgcagatggtgccagagcgcgaacagcaccgtccggcaacgccgtatgaacgtatcccagtaactctggtggaggacaacgcatgagccagtggaaagacatctgcaaaatcgatgacatcctgcctgaaaccggcgtctgcgcgctgttaggtgacgagcaggtcgcgattttccgcccgtatcacagcgatcaggtgtttgcgatcagcaacatcgacccgttcttcgagtccagcgtgctgagtcgcggactgattgcggaacaccagggcgagctgtgggtcgccagcccgctgaaaaaacagcgttttcgcttaagcgacggcttgtgcatggaagacgaacagttttccgtcaaacattacgaagcgcgagtgaaagacggcgtggtgcagctgcgcggttaatgttttaacgggaggcgcaatgcctcccctttttgcatggtcctgtaataatcttcggtatattgcaggacattttttaaactttttgttttattttttgtttttattttttaaaggataatcaaatgtttacagacactattaataagtgtgcggctaacgctgcgcgcattgcacgcctgagcgcaaataacccgctcggcttttgggtcagctccgccatggcgggcgcgtatgtgggtcttgggatcatcctgattttcacgctcggtaatttgctcgatccatccgtacgccctttggtgatgggcgcgacctttggtatcgccttaacgctggtgattatcgccggttctgaactgttcaccggacacaccatgttcctcacctttggggtaaaagcgggcagcatcagccacgggcaaatgtgggcaatcctgccgcaaacctggctgggtaacctggtcggttccgtcttcgttgccatgctctatagctggggcggcggtagcctgctgccggtagataccagcatcgttcactccgtcgcgctggctaaaaccactgcaccggcaatggtactcttcttcaaaggtgcattgtgtaactggctggtttgcctggcaatctggatggcgctgcgcactgaaggggcggcgaaatttatcgctatctggtggtgtctgctggcatttatcgcgtccggctacgagcactctatcgctaacatgacgctgttcgcgctctcctggttcggcaaccacagcgaagcctacacgctggcgggtattggtcataacctgctgtgggtgacgctgggtaatactttaagtggtgccgtattcatgggattgggttattggtatgctacgccgaaagcgaatcgtccggttgcggacaaatttaatcaaactgaaacggctgccggttaattactaaggggtttttacgtggatcatttgcctatattttgccaattacgcgatcgcgactgtctgattgtcggcggtggtgatgtcgcggaacgcaaagcaaggttgctgttagacgcaggcgctcgcttaacggtgaatgcattagcgtttattccacagttcaccgcatgggcagatgcaggcatgttaaccctcgtcgaagggccatttgatgaaagccttctcgacacctgctggctggcgattgcagcgacggatgatgacgcgcttaaccagcgcgtcagcgaagccgctgaagctcgtcgcatcttctgtaacgtggtcgatgcgccgaaagccgccagctttattatgccgagcattattgaccgcagtccgctcatggtagcggtctcctctggcggcacctctccggttctggcacgcctgttgcgcgaaaaacttgaaagtctgctgccgttacatctgggccaggtagcgaaatacgccgggcaattacgcgggcgagtgaaacaacagttcgccacgatgggtgagcgtcgccgtttctgggagaaattgttcgttaacgaccgcctggcgcagagcctggcaaacaacgatcagaaagccattactgaaacgaccgaacagttaatcaacgaaccgctcgaccatcgcggtgaagtggtgctggttggtgcaggtccgggcgatgccgggctgctgacactgaaaggactgcaacaaattcagcaggcagatgtggtggtctacgaccgtctggtttctgacgatattatgaatctggtacgccgcgatgcggaccgtgttttcgtcggcaaacgcgcgggataccactgcgtaccccaggaagagattaaccagatcctgctgcgggaagcgcaaaaaggcaaacgcgtggtgcggctgaaaggtggcgatccgtttatttttggccgtggtggcgaagagctggaaacactgtgcaacgcgggtattccgttcagcgtggttccgggtattaccgcagcttctggttgctctgcctatagcggtattccactcacgcatcgcgattatgcccagagcgtacgcttaattaccggacacttaaaaaccggtggcgagctggactgggaaaacctggcggcagaaaaacagacgctggtgttctatatggggttgaatcaggccgcgactattcagcaaaagctgattgaacacggaatgccaggcgaaatgccggtggcaattgtcgaaaacggtacggcagtcacgcagcgcgtgattgacggtacgctcacacagctgggagaactggcgcagcaaatgaacagtccaagcctaattattattggtcgggttgttggcctgcgcgataaactgaactggttctccaaccattaatttaacccgggccagagaattctggccttcttaatgactctttttatatattcagcaaataaaacatagccccttaataaatattatctgctaatgggttatattcaccgttacagcgacttacaaaattaagtcattcgctcactgacgccaattaaatattcctgtatcgttcttaacgagcagtctgcttatattcatataatcaatgaatattaattaatatataatacatagggaatgtaaatgaacaaatttattaaagttgcactggtaggtgcagtactggctacgttaactgcatgtactggtcatattgaaaaccgtgataagaactgctcttacgactacctgctgcacccggcaatttctatttctaaaatcattggcggttgcggtcctactgcacagtaagtctctgacagaaatcggctaacaccggtttaattgcccgacgccctctggattttccgagggcgtatttgtttctatgtccttcttgcccccgcccgtaaaaatattttcactttaaattcaatttgataactacatccattagccacagcgcgatcctgtgcgaaattttgtgatcttcctccacattacataacatcatatgttgttatattcatcatgcattgtcatgttaccttttaaatgactgcaaactctcccctacaacgtattggacaagaaaaaggtatcgctatgggaagccaggaactccaacgcaagctcggattttgggccgttcttgcaatcgccgtcgggacaaccgtcggctccggtatttttgtatctgtgggtgaagtggcaaaagcagcgggcacgccgtggcttacggtgctcgcgtttgtcattggcgggttaattgtgatcccgcaaatgtgcgtctatgcggaactatccaccgcttatccggaaaatggcgcagattatgtttatctgaaaaatgccggaagccgaccgctggctttcctctccggctgggccagcttctgggccaacgatgcgccgagtttgagcattatggcgctggcgattgtcagcaatcttggctttttaacgcctatcgatccgttgctcggtaaatttatcgccgccggattaattatcgcctttatgttgctacacctgcgctccgttgaaggcggcgcagcgtttcagacgctaattaccatcgccaaaattatcccgttcactatcgtcattggccttgggatcttctggtttaaagcggagaattttgccgcccctaccaccactgcgattggcgcaacgggcagctttatggcgctgctggcggggatctctgccaccagttggagctataccggcatggcctctatctgttatatgaccggcgaaattaaaaaccccggaaaaaccatgccacgagcgctgattggttcctgtctgctggttctggtgctctacaccctgctggcgctggtgatttccggcctgatgcccttcgacaaactcgccaattctgaaacgccgatttccgacgccctgacctggatccccgcactcggcagcaccgctgggatctttgttgccatcacggcgatgatcgtcattcttggtagcctttccagctgcgtgatgtaccagccgcggctggaatacgcgatggcgaaagacaacctgttctttaaatgcttcggccatgtgcatccgaaatacaacacgccggatgtctccatcatcctgcaaggggcgctggggatcttcttcatcttcgtttccgatctcaccagcctgctgggttatttcaccctggtgatgtgtttcaaaaataccctcaccttcggctccatcatctggtgtcgtaaacgcgacgattacaaaccgctgtggcgtactccggctttcgggctgatgaccaccctcgccattgcgagtagcctcattctggtcgccagtacctttgtctgggcaccgattcccggccttatctgcgccgtcatcgttattgctactggtctgcctgcttacgccttctgggcgaagcgtagccgccagctcaacgctttgagctaatgttatctggagaaaataaaatgttggatattgataaaagcaccgtggactttctggtcaccgaaaatatggttcaggaagtggaaaaagttctcagccatgacgttccgctggtgcacgccatcgtggaagagatggtgaagcgcgacattgatcgtatttatttcgttgcctgcggaagcccactcaacgcggcgcaaacggcgaaacatctggcggatcgcttttccgatcttcaggtctacgccatttccggctgggagttctgcgataacaccccgtatcgcctcgacgatcgttgcgcagtaattggcgtttctgactacggtaaaaccgaagaggtaatcaaagcgctggagctgggccgggcctgcggcgcactcactgcggcgttcaccaaacgcgcggatagcccgattaccagcgcggcggaatttagcattgattatcaggccgactgtatctgggaaattcacctgccgctctgctacagcgtggtgctggagatgatcacccgcctcgcgccgaacgcggaaatcggcaagatcaaaaacgatctcaagcagttgccgaatgcgctcggtcatctggtacgcacctgggaagaaaaaggccgccagcttggtgaactggccagccagtggccgatgatttataccgttgctgcgggtccgctgcgtccgctgggttacaaagaaggcattgtaacgctgatggaatttacctggacgcacggctgcgtgattgagagcggagagttccgccatggcccgctggagattgtcgaaccgggcgttccgttcctgttcctgctcggcaatgatgaaagtcgccacaccaccgaacgcgccattaactttgttaaacagcgtactgacaacgtgatcgtcatcgattacgccgaaattagccaagggctgcacccgtggctggcaccgttcctgatgttcgtgccaatggagtggctctgctactacctgtctatttacaaagatcacaacccggatgaacgccgctattacggtggtctggtggaatattaatccctctcccggcccggcaacgggccggatttacgcaaggagttacccgatgaaaacaggtatgtttacctgcggccaccagcggctgcctattgaacacgcatttcgtgatgcaagcgagctgggttacgacggcatcgaaatttggggcggtcgcccgcacgcgttcgcgccggacttaaaagcgggcggcatcaaacaaatcaaggcgctggcgcagacgtatcagatgccgattatcggctatacgccagaaaccaacggctatccgtataacatgatgctgggcgatgaacatatgcgtcgcgaaagcctcgacatgatcaagctggcgatggatatggcaaaagagatgaacgcgggttatacgctgatttccgcggcccacgcgggctatctcacgccacctaatgttatctggggacggctggcagagaacctaagcgaactgtgtgagtacgcggaaaacatcggcatggatctaatcctcgaaccgttaacgccgtatgaaagcaacgtcgtgtgtaatgctaatgatgtgcttcatgcgctggcgctggtgcctagcccgcgcctgttcagcatggtcgacatttgcgcgccgtatgtccaggcggaaccggtgatgagttatttcgacaaactgggcgataaattacgtcatctgcatattgtcgacagcgacggggccagcgacacgcattacattcctggagaaggcaaaatgccgctgcgggaactgatgcgcgatattattgagcggggctatgagggttactgtacggtggagctggtgacgatgtatatgaacgagcccagactctatgcccgccaggcgctggaacgctttcgcgcgctgctgccggaggatgagagatgaaaaccctggcgacaatcggcgataactgcgtcgatatctacccgcaactgaataaagcgttttctggcggtaatgcggtcaatgtggcggtgtactgcactcgctacggcatacagccgggatgcattacctgggtgggtgacgatgactacggcacaaagctgaagcaggatctcgcccgcatgggcgtcgatatcagccatgtccatacgaaacacggcgttaccgcacaaactcaggtggaactgcacgacaatgatcgcgtttttggcgactacaccgaaggcgtgatggccgactttgccctgagtgaagaggattacgcctggctggcgcagtatgacattgtgcacgcggcaatctggggacatgcggaagacgcattcccacagctgcacgctgcgggcaaacttaccgctttcgacttctccgacaagtgggacagcccgctctggcagacactggtgccgcatctcgattttgcctttgcctccgcaccgcaagaagacgaaacgctgcgtctgaagatgaaagcgattgttgcccgtggcgcaggaacagtgattgtcacgctgggtgaaaacggcagcattgcctgggatggcgcgcagttctggcgtcaggctcctgaaccggtgacggttatcgacaccatgggtgccggagatagcttcattgccggattcctttgcggctggtctgcggggatgacattaccgcaggcgatagcgcagggaacggcgtgcgcggcgaaaaccattcagtaccacggtgcctggtaagtataacgttggcgtgagcatcttcacgccaacgtgctgttacttgccggaaaacgaccctataatccgagtaattcattctttatttcagggtcgattatgagtgctacggaccgctactctcatcaactcctctacgctaccgtccgccagcgactgctggatgatatcgcgcagggggtttaccaggccgggcaacagatccctaccgaaaacgagctttgtacacaatataacgtcagccgcattaccattcgcaaagccatcagcgacttagtggcagacggcgtactgatccgctggcagggaaaaggcacctttgtacaaagccagaaagttgaaaacgccctgcttactgtcagtggttttaccgattttggcgtcagtcaaggcaaggcgacgaaagagaaagtgatcgaacaggaacgggtcagcgccgcgccgttttgcgaaaagctgaacatccccggaaacagcgaagtgttccatctctgccgggtgatgtatctcgataaagagccgctgtttattgatagtagttggatcccgctgagccgttatcctgactttgatgagatttacgtcgaaggaagctccacctatcagttatttcaggagcgttttgacacgcgagtggtcagcgacaaaaagaccatcgatatctttgccgccacccgcccgcaggcaaaatggctgaaatgcgaactgggcgaaccgttgtttcgcatcagcaaaatcgcctttgatcagaatgacaaaccggtgcacgtctccgaactcttctgccgcgccaatcgcatcaccttaactattgataataaaagacattaaccgtaggccggataagatgcgccagcatcgcatccggcgatgctggcgcgttgaattttacatcccgtacgttcccctcaccctaaccctctccccaaaggggcgaggggaccgttcagtacggaatttagcttgacggtgctatccagcattaaatactggcaatactctcacgcaaaatccgcagcaccgtctcttcaccgctgcgattcgggttaatgcgaatcgcacaatgttcactttgtggattcgcctggcgaaacgttccggaaaggcgataaaagagcggcgggatttcatatttgctctctgcacccaccgggtaaggcaaggcaccgcgcttttgcgcctcttccagcactctggcggcaatcggctgatgaaactcgacaatcaacaccttgctctgcgcattagcaatcaccgcgcttttcacttccggcaccgcaccaccgttaagcaaagccagcaaccgttcagatacccctgcctgcaccgcgtgcatcactggcgcaaacaccagaccacgcaatacttccagcgcctgtgcgccctggatctggctaccgccggagtaaagcgtggcgcgaatacggttgataacatcagcatcgccgaccactgcaccaacaccctctggcccaaatagcttgaagcaggaaaatgtgctgacattcgcgccgcattcacagccgattcgagccaccttcatcaccgcatagttgtcatcggttaacgctggaacacctgccgcgcgcaacgttgccagcacatctgccagcacgtagctgtcctgcggctgctggcgcgtatgctgcaccagcgccgcatccggttgttgctcgtcgacgacctgcttcagtgcgctcaggtcattgaaatcaacagtaataagcgtcagccccatctgctcaataataacccgtgtcgtcgggtaaacaggcgcgtcatgcaccagaagacgctgccccggtttgagcaaagccgccagcccggcgcgaatcgcgccagtccccgcgtcctgcaccagcgccgcagcctgtgcgtgaaatgcatcagccagcacctgttccacacgctgggtaacgcgcggttgattcagtcctggcgttaagcctaaatcaccgccagtaagaaactcgctgccggggaaatggcgacaaatgctatccaccagcgcaaactgcttttgctgcgcctcaataatcgtcaggctttgcagaggaaacgtcttcataggtgccttccttaagccggaacgaacaggccaagccagtaaagaacattcagcagaataccggtgatcattactgccacgaccggtgccgccattttctgtaccggacggcccagggattcgttgaggaagtaaatggcaaccgcgatagagaatccggtataacccgccatcttaattgctgcgaaaatgctaccgaccagcagcgccacttccatcagcatattcatggcgttacggatgttatcgctcgcattacgcacgctcgggtagcgtcccagccatttgccgatgctacgaagcagcaagacttccgcgctaataaccactgcgcctaataccgctgcaaccatcggattcgggctgagatagtccaccgcataaacaaaggtaaagcccgcaactgcatacacacccgttgctaacgcggtggtggcaatcaacggcacaaaccccagtccgcgcataaattctgccagagccgcctgattaatcagcgtttggctttgttccggcgttacgcctgcggaatatgctttctccagtgtgaagatgctcacttcactgccagcaaaaatcttcatgctggcaacggcggcaatcaatgctcccacgatggcgatatagggtaagtttttgataatccgactcgtgcgttcttcaaacacgctaagcccgctggcatcaatgtcattttcatcacgatgacgcaggtcgtgagttatcgcgatccccagcagcatcaccatgccaataaagatttcgatggattcagggttaagatgtgggaaatagcgcacgactaccacacgggtcatcagtaccaccacggcggcgatcagactttgcttccagccaaactggtagaaaatcgccaccagcgggaacagtgcaaaagcactaaccaccgggctgcttaattcccccaggctacctaatacatccaccggcagcgcggtcagcagctggtttactggcaacaggcaagtaaggatcaacacgccccagatagcgccaagaccaaacgccatcaggctgtttatcgccaggacgccgaggatatcggtaggaagaaagagtaaccatgcgttgagcagcccggttttcagggtaaaagagatccccacgctggccacaaaaccaatgctcagaccaaaagcgatactccccgcctcgcgacggttcatatagccttcaatcagttgcggcaggatcgggcggatgccgtcatgaaaaacagccgcgctgcgatgcgccagaaggcttgtcatacccgtcaggcacgccaccacgataatctgaatatacagatccatagtcgtgccttttatttcagatggttaatcagcatcggaatcgcgtgttcgacgtgctcaacggaaaggccaaacgccacttttccttcagcgatcattttggcgatatgctcgtctttcgctttaatgcctggtttggcaatggtgcaacttttgttatagcctatcaccgcgatggcaatgctcaatgccgcgcccgcaccggtattacacgcgccgatgtaataatccagttgcccggatttcaccttcattgccgcttccatgtcgttgtgaatgaaaacttcaaaacagccaggagccgtcgcttcaatagtttttttaatctgctcacgctgtaagcctgcaacgccaatctttttcatgagtctgtccttattggaaaaattgagagggattttcacgtaacatcacatccacatcggcctgactgaatccactctggcgcaattgcggaataaaggtggttagtaaatagtcatagccataaccaccgttggcttttaaatgggagcggcgcgtaatatccatgctcagcatgacgcggttcagcaacccacggtcgcgtagcgcatgaagcatcgcaatacgcttttcgtccgggtagtaactgttcttgccgatggtgtcgaactgcacgtacgcgccgagatcgatcatcttcaaaatgttgtcgaggttgtctttcagatcgcagtgaccaacggtgacgcggctaagatcaaccccgtgggcttgtagcaacgccagttgctccagccccatcgtgctgaagctcgtatgcgtggagatcgggcgtccggtctggttatgcgccagcgcagcggcaataaataccttctcttccagcggcgtaatctttccttcgctggtgccgatctccgcgatgatcccggctttcagctccgtgccatcgataccctgttcaatttcatcgaccatctcctgcgccagttcctgcacgctgcgggtcgccacatgttccgggaaaaacgcgtcctggtaataaccggtacaggccaccacgttgatccccgtctcgcgcattacatcaagcataaattgcgcattgcgccccatgtaacggttggtcatctcaatcacattacgcacgccccgggtcatcaggtcgttcatctcctggcaaatgaacgcatactgatcaaggcggcagtccacgttgtttttaaagccggagagatcaatatgcagatgctcatgggcgagggtgtaacccgtcggatcaaaactcatagggtgtctcctgcaaaccggagggaggaaagaaaagagcgaccattttgtggcggtggcgcgcggaaaaattcacacacggtagcccccacatcagaaagcgtggtgcgcacaccgagctgcgtagcgatcatcccttgctgataaaccagcactggcaccacttcgcgggtatggtggctgtgaccaatggtcggatcgttgccgtgatccgccatcacgaccaggcaatcatctggctgcatcgcctcaacaagccgggcaaggttacggtcaacgacctgcaaacgttcggcataacgtgcgacgtcttctgcatgaccagcgaggtcggtttcctgaatgttggtgcaaataaacgccgtcggatgggtgttaaattcgttgagggtgatatccataatccgctggctatccaccagattttgccagctcacgccataaggattgttgacgatatctgccaccttacccaccagcacggttggcacgcctgcttcatacagtttttgtggcacctgcactttttcatcgacgccatagcccatatgcacgacctggaaaccgttgtcataagcgccagaacgcggcgcattgataccaataaagcgcccttctttgctttctgcggcatcgagaatgcgttgactgtcggttaacaggccaccaaatgtaatgacccgaccgacctgtacctgctcacgcacgatacgaccaattttgattgcgtcgtcaaaagagatcacagagagattggcggtaatgttatagacctggcctaaatccgcctcgagattatcgccaatcgcaaccgcctgattgacccacagaaattgcagatcatcgccacggcgctccacctgccagccagcggaaactaatgcctgctcaacacggtcaatcacatcgcgaaaaggcatccgcagcggcggtaacgggcgcgtgcctaaaatttcctgatgccccataaaggtatcgccaccttcatgttgcagctctgccacgccccaggttgcggaatcactcggctgcatatcgcctggcgcataacccaatgcgttgattagccccagcgtctccagcgttggtagctgcaaatgcggcaactggctcaggatgtgaccacatgtattcgctcccgcatcttgcggacgcaccagcgtgacatctttcattgcccctacgccaaagctatcaatcactaacaccacaaatcgcgccattacgcccccagagagtttccaagactgtcataacgaccgacgatttccggttcgccacgatgaataccggacaccagcaccacatcgctacgggtgacaaaaatctgcgtgcgaaaacagagcaccactgcactgcttaccggaaactcgcctgccagcggcagggtgtagtcgatactgctgtcatccacagttttgagattggtttcagtaatcttttgattttctggcgtaaacaccaacgcatgttgcgcatgaccacgacgatagtaaccgccgccgtagcagtagctgtcgccacggaaatgatgggagatttcacttaaccagagcatcgcgatacgttcaggctgatcgccctgctggtttgccggaatagtgcccgtcagcgcatgaccgggttcggcatgagtcacaccgtattgcgccagtaatggcaggctagtgcagctggtcgcactaggcgcgttcagttgctcaagtgcaataccagatttcgccagttgatcccgtgcctgtatcagcgtgtgaagattcggtgtcggcaaaacttttccgacagcctcatcccaaagcaggcaagggaaatgggtaagtccggctaaatgcagccctggcagattctggatttcggcgacaatctccggcaacaccttgagggcaaaaccgctctcctggcccggataaagaaaatcatcgtcgctataaactttaagcagcacagactggattcgcccggccttcaccgccgccgcagaaacttcccgcgctttgtcgagagtaaacacggtgatgacgtcggtgccctgttcaacggcgtcagcaacctgatgacaagggatttgtaccagatgcccctgatgcgccacaggcaaaccagcgcggcgcatgactcgcgcctctttgtaatccaccgccacaatgccgctgtagcctaatgccagcaatttttccgccagccacggattacgaccaaactgcttggtcatcagatacagttcaatgccgtaaagccgcgccgtctcaatcagccgcttaccgttttccagtatctgatccacgtcgatcacccagctgtccggggcgatcttgccctgctgccacaggcttagtgcggcggaaatcagcgccgggttctggcgtttcaatgcttctacaaacatcttgttgcctcgtttctgttccttgaattaaatattcatttttttgaatatttaggttgtgcgacgtggatttgtcgggagcttcaaacctcttcgttagcagccatccataatccataaaggttggccagcaaatagccttcttcacacgggttaacttccagtgcgaattccttcaacaacacctgatgcaattgcacaacggcttgccagtggctggattgcgccagttctgccagcaactcgttatccagcggctctatttcttcaccacggcgactgcgcatcagtgcactcgccatatgtgtcatcgccatcgttccttgctcactgcgcaccggcagatggcactctgtttccagtacgttgacgacctgcatcatgcctttgcagatgtccttatcaataacgcctgcctcgcaaagcaggttgagtctggtttccatatcagatgcctttcgtttaataactcggttcctgttccccactcactacccgttgttgatgggcgagcagggcgtgtttatctacaacggcacgcagcagttgttgcattgggtaatcatcgactcgcgtcaggaccacggcttcggtggcctgtaaaaatcgcggatcgtctgtgagcggcgtcgcctctaatcccagcatggtcagttcgttttccgccaccacgttccagatcaccgcatcgacatcgcctttaacaatgcgttgtaaactctcgtgataagagagatcgactcgttccacatcactaccgccaaaaaaaacatcggtcatgattttctgatccgcgctacggttatccagccccacgcgcttcacgtttgcggactcgcctttacggcaaatcaactggtgctcgccaacgtaggtgtgcggccccaactccagcgcgaggcataagcctttttgcgtgagataactttccgccgctagtcggctaaccaccgccatgtcatacacgccattaagcagacactccacgcgaatatccgcgccacgcatgtgcgcatagtaaaaaggaatgccatcaaactgggctttcaatccgctcgccaggccttcgtacaaacgggtatagggcaagggcattgcacataccacgttgttgatatccacatgagtcagcaatgctttgttatccatctcgaccagataactgccattgcgcccacggcgttcaatccgtatcgctccgctactttccagcgttttcaacgcggcctgcgtcaggccaacggaactacggcattcatttgccagctcatctatggttttcaatcgattaccgcacttttcacccaacaaataacgggccagcgtcgtgatgacgacgccttcttttttgataaacgttcgacgcataataaattttcagtaaattgaatatttatatcttcaggaatttgaagataaggcgcaacagcgagatgtggaaacggcgaggcacttcacattttttcggattattgcaaatgaggataaaaaaaccgggtttccccggtttcagagtgatgataaaagcaaaattgcctgatgcgctacgcttatcaggcctacatttccttgcaatatgtgcattactttgtaggccggataaggcgttcacgccgcatccggcatgaacaaagcgcaatttgccagcaatagtgaattacggcttcgccacaaaaccaatcgcttcgtacaccgcttttagcgtacgggaagcgtgcgcgctggctttttccgcgccatctttcatcacctgttgcaggaaggcttcatcgttgcggaaacggtgatagcgttcctgcaattcagtcagcataccggaaacggcatcagccacttcacctttcagatgaccatacatcttgccttcgaactgtttttccagttctgggatgctctggcccgttaccgcactaaggatatccaacaggttggaaacgcccgctttgttctgcacatcgtagcgaactaccggcggctcgtcggagtcagtgaccgcacgtttgattttcttcactacgcttttcgggtcttccagcaggccgataacgttattgcgattatcgtcagacttggacatcttcttggtcggctccagcaggctcattacgcgcgcgccagatttcggaataaacggctccggcaccttaaagatctcgccatacagcgcgttgaaacgctgggcaatatcgcggctcagttcgaggtgctgtttctggtcttcacccaccggtaccagattagtttgatacagcaggatgtccgctgccatcagcaccggatagtcaaacagaccagcgttgatgttctcggcataacgcgcagatttatctttaaactgcgtcatgcgactcagttcgccgaagtaggtatagcagttcagtgcccagcctaactgtgcatgttccggcacgtgggactgaacaaaaatggtgcttttctcaggatcgataccacaagccagatacaaggccagcgtatccagcgtcgctttacgcagcttctgtgcatcctggcgcacggtgatcgcgtgttggtcaacgatacagtaaatgcaatggtagtcatcctgcatgtttacccactgacgcagcgcacccatgtagttaccaatggtcaattcaccactgggctgtgcgccactaaaaacgatgggcttagtcatttttgctttcctgattttcgctatgcggaagccctaatgcgggcagaaggtcatttatagactgataaattacatcaggctggctgagatcgatagcctcgccgtagttatatccgtaggttaagccaacacttgggcaacctgccgcttttgccgcctgaatatcattgcgactgtcgccgacaaacagcatctgttgtggggcaattcccatccgctcagccaccagtaacagcgggtccggatgcggttttttgttttgcacatcatcaccaccaatcaccacgctgaagtatttggcgatatctaaggcttcgagcagcggcgcgacgaacggcgtcggtttgttggtgaccaggcctagcggcaggcctttagcctgcaacgcgcccaacgtatcggcaacgtgcgggaacaaaaacgtcccctcttcggcaacctcgccatagtagcgatcgaacagtttacgcagaatacgtacctgttcttctgccggaatgtcgtcatcaacgggcggtttacccattgttttacgctgagtcgcacgttcctgacgcgcccaggtcaatgcgcgctccatcagaacatctgcgccgttaccaatccaggtaataacgcgttcttcacctgcgacgggcaactccagcgcatacagcgccatatctaccgcagcagcaagaccaggagcactgtcgaccagcgtaccatcaagatcaaaagcgacgccgcgaatatcttcaaacttattcatgacttacctttgccagttcactgcgcatttcatcaatgacttttttgtagtctggctggtcgaagattgcgctaccggcgacgaacatatccgcgcccgccgcagcgatttcgccaatgttgttcaccttcacgccaccgtccacttctagtcgaatgtcaaagccagactcgtcgatacggcgacgtacttcgcgcagtttatccagtgtttgaggaatgaaagactgaccgccgaaaccagggttgacggacatcagcaggatcacatccagcttatccatcacgtaatccagatagctcagaggtgtcgccgggttaaataccagacccgctttacagccattttctttaatcagttgcagcgtgcggtcaacatgctcggaggcttctggatgaaaggtaatgatgctggcaccagcggcagcgaaatcaggcacaatgcgatcgacgggtttcaccatcaggtgtacgtcgataggggcggtaatgccatagttacgcaaggatttcagcaccattggcccaatcgtcagattgggaacatagtggttatccatgacgtcaaaatgcacgacatcagcgccagctgccagggcttttgcggtatcttcacccaggcgggcaaaatcagcgctcagaatactgggggcaatcaaatactgtttcatccgcttctccttgagaattattttttcgcgggactaacgactcctggtttgtacaaagccagcagttcgtccacctttttacgtgtgccgccgttgctgcttatactgcgtcgaactttgacgacatgcaattttgcgcgctgataccactcacgcgttaacatcgtatcgtgattggagatcagcactggaatatggcgctcaaccagaccttcggcgatctccgccagatgcgcttgttgttcaagcgtaaaactgtttgtgtgatacgccgtaaagttggcggtcgcagacagcggtgcataaggcggatcgcaatagacgacggatgcatcatctgcgcgcgccatgctatcggcgtaagactcacaatagaaaaaggcattctgcgctttttcagcgaagtgatacaactctgcttccgggaaatagggttttttgtagcggccgaacggcacgttaaactcaccgcgcagattgtaacgacacaggccgttgtaaccgtagcggttcaaatataaaaacagtaccgcccgacggaacggatcctggcttttgttgaactcttcgcggaactgatagtaaacctcggcgcaatttgtttcgggaacaaacagctcgcgtgcggcctgtacgtactcatcagtacgcatcttcacaatgttatagagactgatcaggtcgctattgatatcggcaaggatataacgagaaaagtcggtgttgagaaacacgctcccggcacctacaaaaggctcaaccagacattcgcccttgggcaaatgccgtttaatatcatcaagcaggggatacttgccccctgcccacttcaaaaaagcgcgatttttcttcatgctgactaactaattacaccttctccggctgtggagaaagctccgacagcatccagcgcttcaggcaactcccgcaacgataaaccattgcgggagataaccttgattacttcagatcggcctgtacctgacgcagcggtttcgcccacgggtttttggcctggacatctgctggcaatgtagataccgcttttttcgcctcttctttgctagcgtacacgccagaaaccaggacataccacggctgaccattacgcgtcgtttcatagacaacgtagtttttcagattctctttcttcgcccaaccgttcaggttgtcgtagttagaggaactgctcagctgcagagtgtaatggctggacggtgcgcttttcaagctaccaacattacctgcggtcttcgccccagcagcgggtgttgctgtggtttgcgccggggatgccgtctgtactggagccgtagtcgccgtctcttttggtgctggcgtagaagtcgcagccggtgccttcgtgctcgccacaggggcagctggttcagtacgcttcggcgtctgtgctaccggcttcggctccgttttcacggttgcttgcggttttttcggttcaatcaccgcctgctgacgagctgggcgcgtagtggacggacgttcagcggtttgcgttttcgccgtgtcacggcttgcattgccattgcgaacaggcgcaaccgttgcgggttcagtcggcaacgtggaattgaccgccacattgttcagctgttgctgattttgtggctgggtcagcgcattgttcaggtcaccctgcacttcaacacgttgttgaccatccgttgccaccggggtttgcccttgagtcggcgtagaagagatcggtggcagagaaacatcctgctgagtattttccgcagacgtggttcccggcgctggctgcacgccattcgcctgatcggtcgcattgccagcaagatcaatactcttctcgccagacgcggtttgatcgctggaagtggtgctgggggcttttagcgcagaaccgataccgatgatcaacagcagtagaaccagaatgccgacgcccatcatcatatactgacgagaagcgggtttactggctgcttttttgcgcttacgcggacgacgctctacgcgctcttcatccacggtttcatcttcggattcgtcaatttcttcttcgatttccggttcctcattgcgctctttttgcgcacgagtcggacggcgatcgtcagtgtcatcaagttcaatatcatcaaaattgatctgcggttcgccacgttcagtacgctcagaacgttcagaagattgacgagaacgaccagtacgacgatcgctgggatcgggtttcagctcgtcttctggtttgaattcatccatttaacaccccactaaaaggttaatgcttaccacgttgcaattaacctgaagctaatagaccgcttgataagcggcctgacctttcttgttgttacgcactttgacaatcggcaatggcgttaagaacaagctcgtggctaacgccgctgcgaacttcactcttaccaattgccaacggaagaattaagcgcatctctcccgcaaggactttcttgtcacgcagcatatgcggtaaatacgcctgcgcggacatttcgcgcggcccattgaccggtaacccagcccgcttgagcagggttataatacgctgcgtttcggcagaactaaactgcccgagacgttcgctcgtccgcgccgccatcaccatacccgcagcgaccgcttcaccatgtaaccaattgccataccccatttcagcttcaatggcatgaccaaaggtgtgtcccagattcagtaaagcacgtaacccggtttcgcgctcgtcggcggcgacaacttctgccttcagttcacaacaacggcgaatacagtacgccattgccggaccgtccagacgcaacaacgcatccagattctcttccagccagttaaaaaacgcaccgtcaagaataatgccgtatttgatgacttctgccagcccgctcgctaactcacgcgggggaagcgttttcagacagtcgagatccaccaccacactagcaggttggtagaacgcgccaatcatgtttttaccgaggggatggttgaccgcagttttgccgccaacggaggaatcgacctggctcagtaacgtcgtcgggacttgaatgaaacggacaccgcgctgataactcgccgccgcgaagccggtcagatcgcccactacgccgccgccaagcgccaccagcgtagtatcgcgaccatgcggtttttgtaacaacgccgtaaagacggtatcgagtacagccaggcttttatactgctcgccgtcagggaggataacgctatcgacgttaacacccgcctgttcaagtacgccgcggaccttatcgagatacagaggagccagggtttcgttggtgaccaacatgacctgctcgccgcttttcagcggtaagaaactagctggttcattaaacaaaccagatgcgatggtaattgggtaactacgttccccgagagtaacgacaatcctctccataacgcgacatccaccttaattactgtacccgcagacgagtgtatataaagccagaattagttgctttccagcatgtgaataatctggtttgcaaccactttagcgctttgatcatcagtacgaatggtcacgtcggcaatctcttcatacagcggattgcgttcattggccaacgcttccagaacttcacgcggcggtgtttcaacgtgcagcaacgggcgttttttatcacgctgcgtgcgtgcaagttgcttttcgatggtcgtttcaagataaacgacaacgccacgagcggaaagacggttacgcgtttcacgggatttcacagagccgccgccagtagccagcacaataccctgtttctcggtcaactcattgatgaccttttcttcgcgatcgcggaagccttcttcgccttctaaatcgaaaacccagcccacatcagctccggttcgtttctcaatctcttgatcggaatcgtaaaattccatattgagttgttgagctaactggcgcccaatagtgctttttccggcacccataggcccaaccagaaagatattgcgtttctctgccattttttcggtactactaagactattcgttaatgataaacccgcttcgctcagagagcgccgcaggacatgaactgaaacctcataagatattgcgagagtcagactgaaaattatctcaatactccagcgggtttggcaactgaataaatcacccatccctctgcatatctggtcgctgcaagcgcgctgccttgctaccaccgctctggcgataaatcaccgggtaagattagcgtaaaaaagacagcaaaatgccgcctgaatgataaatcatcatcatggaacgcaggcagcgaagagcaccaactctcaaatcggtactccttgtatgctaaatacctgcgcgcgtcaaatagatgaaacacgttcagcgtaaaaacattaccgcttttacggctgtttactcactggaaaccagtcgtggcgtgataaacaccactaactcgcgtcgttcatcttcttttccgtcatgacgaaatgattgcccgaaccagggaatgtcgccaagcaacggtacgctatcctgaccgcttttatttttacgggtaaaaatgccgcccagcgccaacgtttctccgcttttgacctcgacctgcgtttcgatctcctgcttatcaatcgccagcacttcgccatcggcctgctgtagcacctgccccggaacgttctggctgatgtgtaatttcagccggatgcgacctttttgtaacaccgtgggcgtgacctccatccccaggacggcctctttaaattccacgctcgtcgcgccactttccccgctggaaacctgatatggaatttcgctcccctgtttaatgctggcaggctgaagatgactggccagcagacgcggactggcgataatatccagctgctgtttttgttcgagcgcggaaagctcaagatccagcaagcgtccgttgatgcgcccaatgttaaaaccgacatgcgttgtcgccgtcgctacggagaggtcgctaccaagcgtggtgacttgcccaacgccaccagcgtgttgcgcatcggccagcgtccatttcacgcctaactcacgcaaacttttttcattaatggtgacaatatgcgcgctcagctcaacctgcccgaccggcagatccatttgcgctacccactgttcaagcgcgcttaacgccgttttgttatctcgtagcaaaaggcgattggtgcgtttatcgacggtcatactccctttggcactcagcagcttctcccccgctttcgccagttctcccgcgtcggcgtattgcagggttatactgcgattttccagcggcagatttgcctgcgcccgcgcctgctccgcctcctggcgggcgatattgttattctgccaggcaatggaatgcacactgagaatgttgccttcctgccgcgttatcagtccggcgcttttcactacagtttgtagtgcctgcttccagggaacatctgttagatgtaagctcaccgtaccgctgacgtctgggctcacgaccaggttcaacttctcctgttcagccagcgcctgcaacacctgagctaccggaacgtcatccaccatcagcgtcactttttgcggctttgccgcctgtacgccgggtatcagcatcaacagtagtgcggctatccattgcttcatttgtatctccttgccgttgccacaaccattgtggcggttcgcagtttgtcccggtacccagcgttagtacgtctggcgtcagctgtaaaattgtccagccgttttccagcacatcgttttgctgcacccgtcgccatttcttttgcccgtcttttattacaccgatgatgcgctcgcctcgccctaccatcccctgatagcgccactggctaagttcgctaatccggcatagatcttccggcggtttaaaagggtcacgcataccggttaaaaggcacaatgcaatacctgccaacaaccagcgtttaaccctcatgcggcgtctccagttgtagcgtgaacaaaagatcatcaccttccacgcttaagctaaaacggctcacgctgacgttgcgctctgccagccgtgtaaatgcgctcggcactgcttcccacagcgttttcaacgccaactcgcctccctgcgcggatggatgccaggaaaccagttgcgcgccggataactgaaaatccagtgggctaaagggcagcgttttttcctcgctgaagggagcggtgtctaccaggcgatacagtgcggcccactgctggtgatgacttgcccgtagtcgaattaatgcgtcgcgctcttcatggtgtgtgctactcagaaaaatgagcgtaactaacatcagcaaccagaatgcccagcaaagctggcggaggcggggacttgtggcgaaccaccagtcaaagaacatgttcatcgctaaccttccttgttaactgatactcaaattgccagcgtccctgcgcatcctgctgcgtggctccccgctgattgagatgaaaagatgcatcctggcggagactcgtttctagtgcgtttaacgcggtaatgcttgttgtcagccccttgatctccagcgttccctgctgccagcttatcgttgtcagccaggcgtgctcgggtaaaagcgccgccagtgcttccagcgcagattgccagtcgcgggtaaattgtcgctggcgctgccgttggctacgctgttcgcgtaactgctgttgctccagcaaacgtggcttcgttatctgtaagctgcgggcgagttgttgttccgcctgaagcaaaactgcgtctatgcgcgcttcggcgctgcctgtcagacgcagtattagcgttatcccgacggccagcagcagaggcgcaacgaacatcagcaaccagaaacgcagaaaagcggtccggcgttgctgtcgccagggcaaaaaattaattggcgggttcatcagtacgccttcccaagcgccagccccagcgcgatggcaaagtctccacctggcggcggtagcggcggctgacgaacagaaacggcctcccagggatcaaatccgccttcgccacatatcgcgacgctttcgggatcaacggataacgctgccgccagctccttcgcgctagtcatccccaccgccagtttgcgcccccagctatagcgcgtcgcccacagccactgttcgttatcacgccaggccagacattgctgatgagaaggtaaaaaaggcaggaatcgctgtaatgcactggcatccggggtgatcgcgctcacatgaacacgcaacctttctgccagagtaagcagcgttgccagctctttgctttgcgcggcagtcacgttataggcgggactgagactgtcttcgctgtaatcgaagcgcagggagtccggatccatatccagctcgcgggccatcgtcccactcagccaggccgtttgctcccgctcaccaagggacatgctcgggcgcggaaaactccgctgtaatgtgcgactggcgggaaacgccaacataatgtgatgacgctgcggcagttcgcgactccacggtaacaacgttttagccagctgctgcgcatcaacaatccgcccatctttgataatgtcgttctccagcggcaaccgccaccagcgttgcaaaaagcattcttttgcgccccgcacgatcgcaaccgctaccgcttcttgctgttgtaaatgcaaaccaatttgccagatcttaaatgccattgtgatgatctccttatcacccgtcactctgacgggtatatcaatgcgtctggcttgcctttatactaccgcgcgtttgtttataaactgcccaaatgaaactaaatgggaaatttccagtgaagttcgtaaagtattttttgatccttgcagtctgttgcattctgctgggagcaggcagcatttatggcctataccgctacatcgagccacaactgccggatgtggcgacattaaaagatgttcgcctgcaaattccgatgcagatttacagcgccgatggcgagctgattgctcaatacggtgagaaacgtcgtattccggttacgttggatcaaatcccaccggagatggtgaaagcctttatcgcgacagaagacagccgcttctacgagcatcacggcgttgacccggtggggatcttccgtgcagcaagcgtggcgctgttctccggtcacgcgagtcaaggggcaagtaccattacccagcagctggcgagaaacttcttcctcagtccagaacgcacgctgatgcgtaagattaaggaagtcttcctcgcgattcgcattgaacagctgctgacgaaagacgagatcctcgagctttatctgaacaagatttaccttggttaccgcgcctatggtgtcggtgctgcggcacaagtctatttcggaaaaacggtcgaccaactgacgctgaacgaaatggcggtgatagccgggctgccgaaagcgccttccaccttcaacccgctctacagcatggatcgtgccgtcgcgcggcgtaacgtcgtgctgagccggatgctggatgaagggtatatcacccaacaacagttcgatcagacacgcactgaggcgattaacgctaactatcacgcgccggagattgctttctctgcgccgtacctgagcgaaatggtgcgccaggagatgtataaccgttatggcgaaagtgcctatgaagacggttatcgcatttacaccaccatcacccgcaaagtgcagcaggccgcgcagcaggcggtacgtaataacgtgctggactacgacatgcgccacggctatcgcggcccggcaaatgtgctgtggaaagtgggcgagagcgcgtgggataacaacaagattaccgatacgctgaaggcgctgccaacctatggtccgctgctgcctgccgcagtcaccagcgccaatcctcagcaagcgacggcgatgctggcggacgggagcaccgtcgcattgagtatggaaggcgttcgctgggcgcgtccttaccgtagcgatactcagcaaggaccgacgccgcgtaaagtgaccgatgttctgcaaacgggtcagcaaatctgggttcgtcaggttggcgatgcatggtggctggcacaagtgccggaagtgaacagcgcgctggtgagcatcaatccgcaaaacggtgccgttatggcgctggtcggtggctttgatttcaatcagagcaagtttaaccgcgccacccaggcactgcgtcaggtgggttccaacatcaaaccgttcctctacaccgcggcgatggataaaggtctgacgctggcaagtatgttgaacgatgtgccaatttctcgctgggatgcaagtgccggttctgactggcagccgaagaacagtccaccgcagtatgctggtccaattcgcttacgtcaggggctgggtcagagcaaaaacgtggtgatggtacgcgcaatgcgggcgatgggcgtcgactacgctgcagaatatctgcaacgcttcggcttcccggcacaaaacattgtccacaccgaaagcctggcgctgggtagtgcgtccttcaccccaatgcaggtggcgcgcggctacgcggtcatggcgaacggcggcttcctggtggacccgtggtttatcagcaaaattgaaaacgatcagggcggcgtgattttcgaagcgaaaccgaaagtagcctgcccggaatgcgatattccggtgatttacggtgatacgcagaaaagcaacgtgctggaaaataacgatgttgaagatgtcgctatctcccgcgagcagcagaatgtttctgtaccaatgccgcagctggagcaggcaaatcaggcgttagtggcgaagactggcgcgcaggagtacgcaccgcacgtcatcaacactccgctggcattcctgattaagagtgctttgaacaccaatatctttggtgagccaggctggcagggtactggctggcgtgcaggtcgtgatttgcagcgtcgcgatatcggcgggaaaaccgggaccactaacagtagcaaagatgcgtggttcagcggttacggtccgggcgttgtgaccagcgtctggattggctttgatgatcaccgtcgtaatctcggtcatacaacggcttccggagcgattaaagatcagatcagtggttacgaaggcggtgccaagagtgcccagcctgcatgggacgcttatatgaaagccgttcttgaaggtgtgccggagcagccgctgacgccgccaccgggtattgtgacggtgaatatcgatcgcagcaccgggcagttagctaatggtggcaacagccgcgaagagtatttcatcgaaggtacgcagccgacacaacaggcagtgcacgaggtgggaacgaccattatcgataatggcgaggcacaggaattgttctgattaaaaaggcgcttcggcgccttttcagtttgctgacaaagtgcacttgtttatgccggatacggcgtgaacgcgttatccggctaacaaaatcgtgaaaactcaataaattgcagaaaccccataagcctgataaacattgtgcatcaggcaaacttcacgcatttacactcgcccctgccctttcaaccattcgcgcacgaggaacagcgcactgacattgcgcgcttcattgaagtcagggtcttccagccaatccatcatatgcgccagcggccagcgcacctgtggtagcggctctggctcatcgccttccagactttccgggtagagatcttgcgctaccacgatattcattttgctggaaaagtaagacggtgccatgctgagcttcttcaaaaaagtcagatcgttcgctccaaatccaacctcttcttttagctcgcggttagcggcttcgtagacgctttcacccggatcaattaatcctttgctaaaacctaattcgtaggattcagttcccactgcgtattcgcggatcaggatcaggtgatcgtccacaatcggcacaatcatcactgcttcccggttggttggacgcattcgttcataaacacgccgcacgccattgctgaactccagatccacgctctcgacggtaaacagtcgggaacgggctacagtttcaacattcagaatggtgggtttttgtaaacttttgctcatcgtgggatctatgctgtgaaatcagcggttattgtgcgatatcggacacgctttcggcaatgtgaattgcatgttatttacatttatgtaacttaataaataatcgtcctcaaatcaaattaaaagtcaataggttgaaataactccaggaatttgctgatattccgccttcagagggtttgctatgatcagcggttactgtgatgtgcttaatgatgctcaagttaaactccacgcttgccgatagccaaccgcagaatcatgtattgtgtccggtgcgactgaccacgcctgacagactaagtaagatggggaaagcatgagcaccattgtgatttttttagctgctttgctggcctgcagtctacttgcgggatggctgataaaagtgcgatccagacggcgtcagctgccctggaccaacgccttcgcggatgcgcaaacgcgtaaactcacacctgaagaacgtagcgccgttgaaaattatcttgagagcctgacgcaggtattacaggtgcctggcccaacgggagccagcgcggcaccgatctctctggcgctgaatgccgaaagcaacaacgtcatgatgctgacacacgctatcacgcgttacggcatctctaccgacgatccgaataaatggcgttactacctcgatagcgtagaagtccacctgccccctttctgggaacagtacatcaacgatgagaataccgttgaactgattcataccgatagcctgccgctggttattagtctcaacggtcatacgctgcaggagtacatgcaggaaactcgcagctatgccttgcaacctgttccgagtacgcaggcgagcattcgcggggaagagagtgagcaaatcgagctactcaatattcgcaaagaaacgcatgaagaatatgcgctgagtcgtccgcgcgggctgcgtgaagcgttgctgatcgtcgcctccttcctgatgttctttttctgcctgattaccccggatgtatttgttccgtggctggcaggcggcgcgttactgctgctgggcgcaggtctgtgggggctattcgcgcccccggcaaaatcctccctgcgggaaattcattgtctgcgcggtacaccccgtcgttggggattgtttggcgaaaacgatcaggaacagatcaacaatattagtctcggtattatcgacctggtctatcccgcacactggcagccatacattgctcaggatctcggtcaacaaaccgatatcgatatctatctcgaccgccatgtagtgcgtcagggacgatatcttagcctgcatgatgaagtaaaaaactttccgttacagcactggctgcgcagtacgattatcgctgcgggcagcctgctggtgctgtttatgctgttattctggatcccgctggatatgccgctgaaattcactctcagttggatgaaaggcgcgcagaccattgaagccaccagcgtaaaacaactggctgacgctggcgtgcgggtaggcgatacattgcgtattagcggtacgggaatgtgtaatattcgaacttccggaacctggagcgcgaaaaccaatagtccttttttaccgtttgactgcagccagatcatctggaacgacgcccgcagtttgccattaccagaatctgaactggtcaacaaagcgacggcattgactgaagcagttaatcgccagctgcaccctaaaccggaagatgaatctcgcgtcagtgccagtttacgtagtgcaattcaaaaatccggcatggtattgcttgatgattttggcgacattgtactgaagacagcggatttatgttctgccaaagatgactgtgtgcgactgaaaaatgcgctggtcaatctcggcaacagtaaagactgggacgcgctggtaaaacgcgccaacgccgggaagctcgatggcgtgaatgtgttattacgcccggtgagtgcggaaagcctggataacctggtggcaacctccaccgcgccgtttatcacgcatgaaacggcgcgagcggcacaaagtctaaacagtccggcccccggcggattcctgattgtcagcgacgaaggcagcgattttgttgatcagccctggcctagcgcaagtctttacgactacccgccgcaagaacagtggaacgctttccagaaactggcacaaatgctgatgcatacgccgtttaacgccgagggtatcgtcacaaaaatcttcactgacgccaatggtacgcagcatattggccttcatccgatcccggatcgttccggcctgtggcgctatctcagcaccacattgctgctactgacgatgctgggtagcgccatttacaatggcgtacaggcctggcgtcgttaccagcgtcatcgcactcgcatgatggagattcaggcctattatgaaagctgcctgaacccgcaactgatcacccctagtgaaagccttatcgaataacacgtttgcgcggcaggttatgctaccctgtcgcgcaaattgcttcactctggagatttccctcatgcatatcaacattgcctggcaggacgtagataccgttctgctggatatggacggcacgttgctcgacctcgccttcgataactatttctggcaaaagctggtgcctgaaacatggggcgcgaaaaacggggttacgccacaggaagcgatggaatatatgcgccagcaatatcacgacgtacagcatacgctaaactggtactgtcttgattactggagtgagcaactgggtctggatatctgtgcgatgaccaccgagatgggaccgcgtgccgtactgcgtgaagataccattccgtttcttgaggcactgaaagccagcggtaagcagcgaattttgctcaccaatgcgcatccgcacaacctggcggtaaaacttgagcataccggtctggacgcacaccttgatttattactttccacccacacatttggttatccgaaagaggatcagcggttatggcatgcggtggccgaagctacgggtctgaaagctgaaagaacgctgtttattgatgacagcgaagcgattctcgatgctgccgcgcaatttggtattcgttactgcctcggcgtgactaatcctgattccgggattgccgagaaacagtatcaacgccatccgagtctgaatgactaccgccgcctgatccccagcctaatgtgaaggagacgccatgaaagagaaacctgctgttgaggttcgactggataaatggctatgggctgcccgtttttataaaacccgcgcgctggcccgtgaaatgattgaaggcggtaaggtgcattacaacgggcagcgcagcaagccgagcaaaatcgtcgagctgaatgccacgctcactctgcgccagggaaatgacgaacgcacggtgattgtaaaggcgattactgaacagcgtcgccccgccagcgaggcagccttgctgtatgaagagactgcggaaagtgtagagaaacgcgaaaaaatggcgctggcacgtaaacttaatgccttaaccatgccgcacccggaccgacgcccggacaaaaaagagcgccgcgacctgttacgatttaaacacggcgacagtgaataactgtcacctgcaagagagatgattatgccgcaacatgaccaattacatcgctatctgtttgaaaactttgccgtgcgcggcgaactggtaaccgttagcgaaaccctgcaacagatccttgagaaccacgattatccgcagcccgttaaaaacgtgctggcagaactgctggttgcgaccagcctgttaaccgctacgctgaagtttgatggtgatatcaccgtacagctgcagggcgacggtccgatgaatctggcggttattaacggtaacaataaccagcagatgcgcggtgtggcgcgcgtgcagggcgaaattccagaaaatgccgacctgaaaacgctggtcggcaatggttacgtggtgatcaccattaccccgagcgaaggcgaacgctatcagggcgtagttggtctggaaggtgataccctggcggcctgcctggaagattactttatgcgttctgaacagctgccgacgcgcctgtttattcgcaccggcgacgtagacggcaaaccggctgcaggcggtatgttgttgcaggtaatgcctgcgcaaaatgcccagcaggacgactttgaccacctggcgacgctaaccgaaaccatcaaaaccgaagaactgctgaccttaccggcaaacgaagtgttgtggcgtttgtatcacgaagaagaggtgacggtttacgatccgcaggatgtggagttcaaatgcacctgcagccgtgaacgttgcgccgatgcgctgaaaacgctgcctgatgaagaagttgatagcatcctggcggaagatggcgaaattgacatgcattgtgattactgcggtaaccactatctgttcaatgcgatggatattgctgaaatccgcaacaacgcgtctccggcagatccgcaagttcattaatgagtatgtccggcagagagggctctgccggattttacgactaatacacctgatgcgctttgtcactcattcagattcacattcagcctttcaccatccactacaagatcgcgccacgctttaggcttcgtccccagttttccatccttcgcagctgtgagtaatttttctttcgttatttcgttcggaagtaaactcatatcaagcgcgtcccattcttttctgtcactgtcaaagccatagacaatgactctgtcatcattaaaagcaaacaggatccgctccgcctgaccatcactattcagatcttgctcgaccaggacgcaggcgtctttttcaatacaggtcatcacgttatagcgatcctggattaaggcgctccagaatgtcgcatcaggtttaacagaaccaggggcaattaacacattatcggctaatactttttcgcttacctgttgctgaagatgttgctctccatctaacgccatcagcagatcccgcgcgcgtttcgggtctttcataaacccggcatcgcttttcaggctctcaagcgcagcacgtccatagcgaccgctctgctcgagcatgtagatagttacctggtcactcgtgtttttgccgctctgataacgcgccatatggctgttcacgctaatgcgcatactgtccagcaccgggctattaagaagcaccagtatcaccaacaccaataagctaaccgcaaggttcactttgccctgaagaacaacgggattttgccctttacgccagacgatgctgacaaaataccccaggctccacaccagtaacaccagcaccgccagcacgccctgcaagcggtcgacagtccagccgtactgagcgacccgcagccataacgcccaggcggcgacgaacacatacagcggagcaaccagcaaagcggttttaatcaggcaacgcaacggccctgtccagggaagactcgctttttgcggatcgcggacaatagccattaagatcaattgcaaaaaggccagcgtcaacagcaacccggcggcggagatgtggcgagaaatcgcgctcaggcccgtaaacggcagggtgatgataaacatcagggttagcaaacttactaacggcagcaaccccgtggcgattaacgtgaacaacttttgaatagagtcgattaaacgactctgtgttcgcgcgaggatcaccgccagcgcggtaaccagacctaacgtgagataaataaaccagtcggttgcaaaaaagagcgtattgaaaaacgtgatgccaacaagtttaaacaactcactccacagtaaaagcaccagccacgtcaagccattggcgagaaaaatcaccagtaatataagtacgttatgccatacactctggtaaaaatagcgatagcggctactgtcattgcggatgcgaaggctttgttgtatccacggtagcaacaacattgccatcaacagcagatagcaaccaaaatcccaaagcgccttttcagctctccaggggttcatgccatcagtttgccacttcagccagccgctcatccccagcgtggcaataaacactagcgccagccatccccaaaggcgcttctgtttaaaagagatcacggagaagagtaaaacggaactaaacgcgacggtcgcaggcacgccataaacaatccaactgtgattttttccggaaagccaggcgatcagcaggtagcaaaccagaccctgaagtaatccggtagcaatcatcccccagcgtgttgcgggactaagttcaacgttatccatgttggttatccagaatcaaaaggtgggttaattatcgcatccgggcagtagtattttgcttttttcagaaaataatcaaaaaaagttagcgtggtgaatcgatactttaccggttgaatttgcatcaatttcattcaggaatgcgattccactcacaatattcccgccatataaaccaagatttaaccttttgagaacattttccacacctaaaatgctatttctgcgataatagcaaccgtttcgtgacaggaatcacggagttttttgtcaaatatgaatttctccagatacgtaaatctatgagccttgtcgcggttaacacccccaaaaagactttactattcaggcaatacatattggctaaggagcagtgaaatgcgcgttaacaatggtttgaccccgcaagaactcgaggcttatggtatcagtgacgtacatgatatcgtttacaacccaagctacgacctgctgtatcaggaagagctcgatccgagcctgacaggttatgagcgcggggtgttaactaatctgggtgccgttgccgtcgataccgggatcttcaccggtcgtagtccaaaagataagtatatcgtccgtgacgataccactcgcgatactttctggtgggcagacaaaggcaaaggtaagaacgacaacaaacctctctctccggaaacctggcagcatctgaaaggcctggtgaccaggcagctttccggcaaacgtctgttcgttgtcgacgctttctgtggtgcgaacccggatactcgtctttccgtccgtttcatcaccgaagtggcctggcaggcgcattttgtcaaaaacatgtttattcgcccgagcgatgaagaactggcaggtttcaaaccagactttatcgttatgaacggcgcgaagtgcactaacccgcagtggaaagaacagggtctcaactccgaaaacttcgtggcgtttaacctgaccgagcgcatgcagctgattggcggcacctggtacggcggcgaaatgaagaaagggatgttcagcatgatgaactacctgctgccgctgaaaggtatcgcttctatgcactgctccgccaacgttggtgagaaaggcgatgttgcggtgttcttcggcctttccggcaccggtaaaaccaccctttccaccgacccgaaacgtcgcctgattggcgatgacgaacacggctgggacgatgacggcgtgtttaacttcgaaggcggctgctacgcaaaaactatcaagctgagcaaagaagcggaacctgaaatctacaacgctatccgtcgtgatgcgttgctggaaaacgtcaccgtgcgtgaagatggcactatcgactttgatgatggtagtaaaaccgagaacacccgcgtttcttatccgatctatcacatcgataacattgttaagccggtttccaaagcgggccacgcgactaaggttatcttcctgactgctgatgctttcggcgtgttgccgccggtttctcgcctgactgccgatcaaacccagtatcacttcctctctggcttcaccgccaaactggccggtactgagcgtggcatcaccgaaccgacgccaaccttctccgcttgcttcggcgcggcattcctgagcctgcacccgactcagtacgcagaagtgctggtgaaacgtatgcaggcggcgggcgcgcaggcttatctggttaacactggctggaacggcactggcaaacgtatcagcattaaagatacccgcgccattatcgacgccatcctcaacggtagcctggataatgcagaaaccttcactctgccgatgtttaacctggcgatcccaaccgaactgccgggcgtagacacgaagattctcgatccgcgtaacacctacgcttctccggaacagtggcaggaaaaagccgaaaccctggcgaaactgtttatcgacaacttcgataaatacaccgacacccctgcgggtgccgcgctggtagcggctggtccgaaactgtaatgatttgaagctggagaatatctatccagtatcttatagaaagcaaaacgggaggcaccttcgcctcccgtttatttacccttcttttgtcgtgccctgcgcccgcgttaccggcactggcagccaggcgcgaatggaaagcccgccccgctcgctggtgccaagctccagcatcccgttatggttatccacgatacgctgcacaattgccagccctaatcccgtgccgctaatggtgcgcgcactgtcgccgcggacaaacggctggaacaggtgcttacgttgttccggcgcaattcccggaccgtcatcttccacctggaaccaggcgcgattcggctccgttccgctgctgactttgatccagccattgccataacgggcggcgttgaccaccatattcgccaccgcgcgtttgatgctcagcgggtgcattttcacttcaatgctgccggggtaaagcgcggtttcaatttcccgctcatagccactttcggcagcaatcacctcaccgagtactgcattaagatccgccatttccatcggcatctcctgcccggtgcgcaggtagtcgataaactgctcaatgatggcgttgcactcttcgatatctttattgatgctttctgccagatagccatcctgctcgctcatcatctcagtcgccaggcgaatacgcgtcagcggcgtgcgcaagtcgtgacttacccccgccatcagcagcgtgcggtcatccgccagttgcttaacaccagccgccatatggttaaaggcacgggtaacggaacgcacctcgctagcgccatactcacgcagcggcggcggaataatccctttaccaacctgcaaggctgcgtgttcgagatcgaccaacggtcggttctggatacgaataaacagccacgccccgcctatcgccaatagcataatcgccagcgtatagcggaacagcggagagaaatcgccctgatgaatttcggtcagcggcacgcgtacccagatattggggctcagccaggttttcagccagacgacagggctacttttgttgacctcaacgcgcacttccgtcgggccgcccagttgctgcgccatctgatggcttaagaattcatagtgttgcgcccaacgcagacctgcctcttcggcagcctcgttggagtagagagagatccccagctcacggtagatctcccgacggaaagcgggaggcacaaccaactgcgtgccgtcctccagttgcagtttgtcggtcatcaacatacgcacttcgtacgcgaggactttattaaactgctggaggctcggcaaaatcgcgaagttcagcaccaccagataagtcgtcaccaggctggcgaacagcaaggtgacgatgagcaataacgtacgggcaaaactacttcgtgggctgaagcgcaatcgcctcatgctttagagccgtccggtacaaagacgtagcccagaccccagacggtctgaatgtaacgcggatgcgctggatcttcttccaccatgcggcgcagacggctaatctgcacgtcgatggagcgttccattgcggaatattcacgaccacgggcaaggttcatcagcttatcgcgggagagcggctcacgcggatggctgaccagtgccttcagtaccgcaaactcaccgctggtgagcggcatcggctcgtcttcgcggaacatttcgcgcgtaccgaggttaagtttgaacttaccgaaagcaattaccgcctcttcctgactcggtgcgcctggcagttcgttcgcctgacgacgcagcaccgcacggatacgggccagcagttcacgcgggttaaacggttttggaatgtagtcgtcagcgccaatctccaggcctacgatacggtccacttcttcccctttcgccgtcaccataatgatcggcatcgggttgctctgactacgaagacgtcggcaaatgctcaagccatcttcaccaggtaacattaaatccagtaccataagatggaaagattcacgagtcagcaggcgatccatctgttctgcattagcgacgcttcgaacctggaagccttgttcggtgagataacgttccagcagcgcacgcaggcgcatgtcgtcatcgaccaccagaatcttgtagttctcttgcattgtttgtactcccaaaggttcgcaacaatttgtaagcgtgtattcttaaaaaagctcacgttcgtcaccagctaaatctggtatgaatttcagcctaaattgttacaaagcatattaaacagcagcttaagtatacaatttattcggcgaaacattattgattctgttgatatgatcacgttatacccaatgtgcgcattatcaaacagacaaagggaatcaacgagatgaaaacgcccctggttacccgggaagggtatgaaaaactcaaacaagagcttaattatctctggcgtgaagaacgcccggaggtcacaaaaaaggtgacctgggccgcaagtctgggcgaccgcagcgaaaatgctgactatcagtataataaaaagcgtctgcgtgaaatcgaccgtcgcgtgcgctatctcactaaatgcctggaaaatctcaaaatcgtcgattactcccctcagcaggaaggcaaagtcttttttggcgcgtgggtggagattgaaaacgacgatggcgtgactcaccgtttccgtattgtcggctacgatgaaatttttggccgtaaagattacatctctatcgattccccgatggcccgcgcattgctgaaaaaagaagtcggcgatctggcggtggtgaatacccctgccggggaagcgagctggtatgttaatgctatcgagtacgtgaaaccgtaaggaagagtcttaacctcctgccgatggctggcatttttgccagccagtccgtataactatcccctgatttttgatccgaaaagatgaactcaaaccatgatgaatgatagcttctgccgcattattgcgggtgaaattcaggcgcgcccggaacaggttgacgctgccgttcgcctgcttgacgaagggaataccgtgccgtttatcgcacgttatcgtaaggaaatcaccggcggtctggatgacacgcagctgcgtaatctggaaacgcgtctgagctatctgcgcgagctggaagagagacgtcaggcgatcctcaagtccatttccgagcaaggcaaactcaccgatgatctggcgaaggccatcaacgccaccctaagcaaaaccgaactcgaagacctctacctgccctacaaacctaaacgccgcacccgcgggcaaatcgccattgaagcagggcttgagccgttggctgacctgctgtggagcgatccgagtcacacgccagaagtcgccgctgcacaatatgtttatgccgataaaggcgtggcagataccaaagccgcgctggatggcgcgcgctatatcctgatggaacggtttgccgaagatgccgcgctgctggcgaaagtgcgtgattatctgtggaagaacgcgcatttggtttctacggtggtgagcggtaaagaagaggaaggggcgaaattccgcgactatttcgatcatcacgaaccgttgtccacggtgccttctcaccgcgcgctggcgatgttccgtgggcgtaacgaaggcgtacttcagcttagcctgaatgccgatccacagttcgatgagccgcccaaagagagctattgcgagcaaatcatcatggatcaccttggcctgcgcctgaacaatgccccggcggatagctggcgcaaaggcgtggtgagctggacgtggcgcatcaaggtgctgatgcatctggaaaccgaactgatgggcaccgtgcgcgaacgtgcggaagatgaagcaatcaacgtctttgcccgtaacctgcacgatctgctgatggcggcccctgccggactgcgtgcaacgatgggcctcgatccgggtctgcgtactggggtaaaagtggcggtggtcgatgccactggcaaactggtggcgaccgacaccatttacccgcacaccggacaggccgcaaaagcagcgatgaccgttgctgcgctgtgtgaaaaacataacgttgaactggtagcgatcggtaacggtacagcttcccgcgaaactgagcgtttctatctcgatgtgcagaagcagttcccgaaagtgaccgcgcagaaagtaatcgtcagcgaagcaggcgcgagcgtttacagcgcttccgagctggctgcacaggagttcccggatctcgacgttagcctgcgtggcgcggtgtctatcgcccgccgtttgcaggatccgctggcggagctggtgaaaatcgatccgaaatctatcggcgtaggtcagtatcagcatgacgtcagccagacgcaactggcccgcaaactggacgcagtagtagaagactgcgtaaacgccgttggcgtcgatctcaacactgcttctgttccgctgttaacccgcgtggcgggcctgacgcgcatgatggcgcaaaacatcgttgcctggcgcgatgagaacggtcagttccagaaccgtcagcaactgttaaaagtgagccgtctggggccgaaagccttcgagcagtgcgcgggcttcttgcgcattaaccacggtgataacccgctggacgcgtctaccgttcacccggaagcctatccggtggtggaacgcattctggcagcaacacagcaggcactgaaagatctgatgggtaacagcagcgaactgcgtaacctgaaagcgtctgactttactgatgagaaattcggtgtgccgacggtaaccgacatcatcaaagagctggaaaaaccgggtcgcgatccgcgtccggaatttaaaaccgctcagtttgccgatggcgtcgagacaatgaacgacctgcaaccgggtatgatcctcgaaggcgcagtgaccaacgtcaccaactttggcgcgtttgtcgatattggcgtgcatcaggacggcctggttcacatctctagtttgagcaacaagtttgtggaagatccgcataccgtggtgaaagcgggcgacattgtgaaggtgaaagtgctggaagtggatcttcagcgtaaacgtatcgccctgactatgcgcctggatgagcagcctggcgaaaccaacgctcgtcgcggcggcggtaatgaacgcccgcaaaacaaccgcccggcagccaaaccacgcggtcgtgaagcgcagcctgccggtaatagcgcgatgatggatgcgctggcggcggcaatgggcaaaaaacgttaaacgcccgtactggcctacggttcgaatttgcacgaaatcgtagggcagataaggcgttcacgccgcatctggcaacgaacgccttgcctgacataaaagtgccggagaatatctccggcatttttattccacagccaaactcataatatattccggcaatatttatcatttcattaacaactgaaaccttaattaaacattagccagtccgggtaattcactattcgaattatattttcgctgcgatataaccttgagccacatcaacattgagtcagattattattcaaaccaacattcgcacacattttaagtattgctgatagaaaccattctcattatcattgtgttgttgattatttaatctctcctttgttggcaaatcatctggtctcatgtcgctgtcaaacgccccatgaggtagttatccagttaatgagaaacaagtaggcacctatgcaatacactccagatactgcgtggaaaatcactggcttttcccgtgaaatcagcccggcatatcgccaaaaactgctttctcttggcatgttacctggctcctcttttaatgtggtgcgcgtcgctccactcggcgaccccattcatatcgaaacccgtcgtgtgagcctggtattacgcaaaaaagatctggccttattagaagtggaagcggtttcctgttaatacggtgataacaacaatgaaaaaattaaccattggcttaattggtaatccaaattctggcaagacaacgttatttaaccagctcactggcagtcgtcagcgtgtaggtaactgggctggcgttaccgtcgaacgtaaagaagggcaattctccaccaccgatcatcaggtcacgctggtggacctgcccggcacctattctctgaccaccatcagtagccagaccagcctcgatgagcaaatcgcctgtcactacattttgagtggcgacgccgacctgctgattaacgtggtggatgcgtctaaccttgagcgtaacctgtacctgacgctacaactgctggaactcggcattccctgcattgtggcactgaacatgctcgacattgccgagaagcaaaatattcgtattgaaattgatgctctgagcgcgcgtctgggctgtccggtgatcccgctggttagtacccgtggtcgcggtattgaagcgctcaagctggcgattgatcgctataaagctaacgagaatgtggaactggtgcattacgcacagccgctgctcaacgaagcagatagtctggcaaaagtgatgccttccgacatcccgctgaaacaacgtcgctggctgggcctgcaaatgctggaaggcgatatctacagccgcgcctacgccggtgaagcgagccagcatctggatgccgccctcgcccgtctgcgtaatgagatggacgatccggcgctgcacattgccgatgcgcgttaccagtgcattgctgccatctgtgatgtggtaagcaacaccctgacggcagaacccagccgtttcaccactgcggtagataaaatcgtgctcaaccgtttcctcggtctgccgattttcctctttgtgatgtacctgatgttcctgctggctatcaacatcggcggggcgttacagccgctgtttgacgtcggctccgtggcgctatttgtgcatggtattcaatggattggctacacgctccacttcccggactggctgactatcttcctcgcccagggcctgggtggcggcattaacaccgtgctgccactggtgccgcagattggcatgatgtacctgttcctctccttccttgaggactccgggtatatggcgcgtgcggcgtttgtgatggaccgtctgatgcaggcgctgggcttgccggggaaatcctttgtgccgctgatcgtcggtttcggttgtaacgtaccgagcgtaatgggtgcacgtacgcttgatgcaccgcgtgaacgtctgatgaccatcatgatggcaccgtttatgtcctgcggcgcgcgtctggctatcttcgcagtattcgcggctgccttcttcgggcagaacggtgcgctggcggtcttcagcctgtatatgctgggtattgtgatggcggtgctgactggcctgatgctcaagtacaccatcatgcgcggtgaagcgacgccgtttgtcatggagttgccggtctatcatgtaccacacgttaaaagcctgattatccagacctggcagcgtctgaaaggcttcgttctgcgtgctggtaaagtgatcatcatcgtcagcattttcctgagcgctttcaacagcttcagcctgagcgggaaaatcgtcgataacatcaacgacagcgcgctggcgtccgtcagccgggtgatcaccccggtcttcaagccaattggcgtgcatgaagataactggcaggcaacggttggcctgtttacaggtgccatggcgaaagaagtggtagtgggtacgctcaacaccctctacaccgcagaaaatattcaggacgaagagttcaatccggcagaatttaacctcggtgaagagctgttcagtgcgatagatgaaacctggcagagcctgaaagacaccttcagccttagcgtactgatgaaccccattgaagccagcaaaggcgacggcgaaatgggtaccggggcgatgggcgtgatggatcagaaattcggtagcgcagcagcagcttacagctacctgattttcgtcctgctgtatgtaccatgtatcagcgtgatgggggctatcgcccgtgaaagtagccgtggctggatgggcttctccatcctgtgggggctgaatatcgcttacagtctggcaacattgttctatcaggtcgccagctacagtcagcatccaacttacagcctggtgtgcattctggcggttatcctgtttaacatcgtggttatcggtctgctgcgccgcgcgcgtagccgggtggatatcgaactgctggcaacccgcaagagcgtaagcagttgctgcgcagccagcaccaccggtgattgccattaatggctagtcttattcaggtgcgcgatttgctggcgttacggggccgtatggaagcggcccagataagccagacattgaacactccacagccaatgattaacgccatgctgcaacaactggaaagtatgggcaaagccgtgcggattcaggaagaacctgacggctgcctctctggcagttgtaaaagctgcccggaaggaaaagcctgtctgcgcgagtggtgggcgctgcgttaaccttactccatcgcctgttttggaaagcccggtatgcgtctgcatccgggcttttttgcgtgcggctttccataaaaatgcaactcttgcagcacggcgtaagttcctttgaaagcatctcgcagggatgaaaactcgctaatacacaggtgtggagtggcgcgtagagtcgcggcattcaaacaacaggtgaaggaacgccatgagcaaaaagcagagttccaccccacacgatgcgctgttcaaactctttttacgccaaccggacacggctcgtgattttcttgcgtttcatttaccggcacccattcacgcgctttgtgatatgaaaaccctcaagctggagagcagcagctttattgatgacgatctgcgtgaaagctattccgatgtgctgtggagcgtgaaaacggaacaaggaccaggatacatctattgtctgattgaacatcaaagcaccagtaacaaactgatcgcatttcgcatgatgcgttacgctattgccgcaatgcaaaatcaccttgatgctggatacaaaacgttgccgatggtggtgccattgttgttttaccacggtattgaaagcccctatccctatagcctgtgttggctggattgtttcgccgatcccaaactggcaaggcagctttatgcctccgcatttccgctgattgatgtcaccgtcatgcctgatgatgaaatcatgcagcaccgacgtatggcgctgctggagttaattcaaaaacatattcgtcaacgcgacctgatggggctggtagagcaaatggcctgcttattaagtagtggatacgctaatgacagacaaatcaaagggctgtttaattacatactgcaaactggcgacgctgtacgttttaacgattttatcgacggcgttgccgaacgtagtccgaaacacaaggagagtttaatgactattgcggaaagattgcggcaggagggggaacaatccaaagccctgcatatagccaaaataatgcttgaatccggagttcctcttgcagacatcatgcgctttaccgggctgagtgaagaagagttggctgcggcgagtcagtaaagttctgtctcgccatttcaaaagccacttacaccctctgcttcaacgccaccagcaggtgacaaaactcggccggatggctaataaatggcgcatgggccgctttggcgaagatataactttcgctgtgaggccaaagtttatccagcatcggcaccactttgcgcggcaccagaccgtcgagatagccatacaatcgcaaaaacggcatggacacgttttgcagcggctgacggagatcgaccgttttcaggatttccagcccgccattaagcacgtcaacctccggcatcggtaacgccagaacggttttcttcaacgcccgcgcatcctggcgcgccgtttcagtccccatggtttgtaacgccaggaaccgctccactgtacgctgaaaatcatcactgagttgctgctgaaatcccgccagcacgtccggttttatccccggccactcgtcacgagcactaaaacaaggactgctcgccacggtgaccagcgcctgaacacgctcgggatgggttaacgcaatctggcttgccaccagcccgcccagactccagcctaaccaaatggctttatcaggtgcctgttgcagcacggcttcggccatatcagcaagactcagcgcaccaaatccccggctacgcccgaagccgggcaggtcaacaaggtgcagcgtaaaatggctgctaagttcctcgtcaatgcaacgccacacttcggcattcagtccccatccgtgcagcagcacaagatgaacattcccctgacctttggtctgccaccagatgttattcatccgctattgttctcttttgacttacaaggatgaacatatgctaacagtaccgggattatgctggctatgccgaatgccactggcgttaggtcattgggggatttgtagcgtctgtagtcgcgccacccgcacagataaaacgttatgcccacaatgtggattacccgccacacactcccatcttccctgcggtcgctgcctgcaaaaaccgccgccctggcaaagactggtcacggttgccgactatgcgccgccgttaagtccgcttatccaccagcttaaattttcccggcgcagtgaaatcgccagcgccctgagtcgtctgttactattggaagtcttacacgctcgtcgcaccaccgggttgcaattgccggatcgcatcgtcagcgttccgttatggcagcggcgtcactggcgtcggggatttaatcagagcgatttgctgtgtcagccgttaagtcgctggttgcactgccaatgggatagcgaagccgtcacacgtacacgggccactgcgacccagcattttctcagtgcccggctgcgcaagcgcaacctgaaaaatgcctttcgtcttgaattgcccgtgcaaggtcgccatatggtgattgtggatgatgtcgttaccaccggaagtaccgtcgcagagattgcgcagttgcttttacgcaatggtgcggcggctgtccaggtctggtgcctttgtcgaaccttgtaaagcctcgatgatgggcgtattataaccaactaaaatagtcaactattaggccattactatgatccgtatttccgatgctgcacaagcgcactttgccaaactgctggcaaatcaggaagaagggacacaaatccgcgtatttgtgattaaccctggcacgcctaacgctgaatgtggcgtttcttattgtccgccggacgctgtggaagccaccgacacagccctgaaatttgacctgctgaccgcgtatgttgatgagttaagcgcaccatacctggaagatgcagagatcgattttgttaccgaccagttgggttcccagttaacgctgaaagccccgaacgccaaaatgcgtaaagtggcagacgatgcaccgctgatggagcgcgtggagtatatgctgcagagccagatcaacccacagcttgctggtcacggtggtcgcgttagcctgatggaaatcaccgaagacggttacgccattctgcaatttggcggtggctgtaacggttgttccatggtcgatgtgacgctgaaagaagggatcgagaagcagctgctgaacgaattcccggagctgaaaggtgtgcgcgatctcaccgaacaccagcgcggcgaacactcctactactaagttatcccctcttttgtagattgcccgatgcgacgctaaagcgtcatttcgggcctacgttgaacatgtgccagacgttggcgcagcattgctttgtcaaatcctcggttcgtttccccgcgataatatgaccaacctctcataatttaaatttaccccgctctggtgattctcaaacgccagatgttacccgtatcattcacatgggtaccaaacatactcctgacatctgactacaataattagttttagtgggtatcagtcgtggtgccgcaatatctctgttcccgattgggataattagagtttgtcgtcagaaaattgacgttacccataacaaatgaaaggccaggtaaatcatgccattagtcattgttgctatcggtgtaatcttgttgttgctcctgatgatccgcttcaaaatgaacggcttcatcgctctcgtcctcgtggcgcttgctgttggattaatgcaaggaatgccgctggataaagttattggctccatcaaagccggtgtcggcgggacgctcggtagccttgccctgatcatgggttttggcgcaatgctgggcaaaatgctggcagactgcggtggcgcacaacgtatcgccaccacgctgattgccaaatttggtaaaaaacacatccagtgggcggtggtactgaccggttttaccgttggttttgccctgttctatgaagtgggctttgtgctgatgctgccgctggtgtttaccatcgcggcttctgcgaatattccactgctgtatgttggtgtaccaatggcggctgcactgtctgtgacccacggcttcctgccaccgcatccgggtccgactgcgattgccaccattttcaatgccgatatgggtaaaaccctgctgtacggtactattctggcaatcccgaccgtgattctcgccggtccggtttacgctcgcgtgttgaaaggtatcgataagccaattccggaaggtctctacagcgcgaaaaccttcagcgaagaagagatgccgagctttggcgtcagcgtctggacctctctggtgccggtagtactgatggcgatgcgtgcgattgccgaaatgatcctgccgaaaggtcacgctttcctgccggtagcggagttcctcggtgacccggtaatggcaacgctgattgccgtgctgattgcgatgttcacctttggtctaaaccgtggtcgtagtatggatcagattaacgacacgctggtttcttccatcaaaatcattgcgatgatgctgttgatcatcggtggtggcggtgcgttcaagcaggtgctggtagacagcggcgtggacaaatacattgcttccatgatgcacgaaaccaacatttctccgctgctgatggcctggagcattgctgccgtactgcgtatcgcgctgggttccgcaaccgttgcggcaatcactgcgggtggtatcgcggcaccgctgattgcaacgacgggtgttagcccggagctgatggttattgcggttggttccggtagtgtgattttctctcatgtgaacgatccgggcttctggctgttcaaagagtactttaacctgactatcggcgagaccatcaaatcctggagcatgctggaaaccattatcagcgtgtgcggtctggtaggctgtctgctgctgaatatggtgatttgataacactgactgccggatgcggcgtgaccgccttatccggcctacgattcgggatgaattagtaggccggataagacgcgtcaagcatcgcatccggcatcaaccgcactttacttcttcttcgctgcagctctgcgccgtctgtccaaatccttcagcaacttgttcacgccatcatcggcaaacatgctctcaagcgttgcggaaagcttgcgtcgccagtttttatactggtaactggtgccaggaatattcaccggttcggccatatccagccagtcttccggctgtagtcctaacagagcactgttactgtcggcaatgtagcgctgcaaaccacggttcagcgtcggcgtcatgctcatcaagcttgccttatgcccggcacgtttcggcagacaaccatatttatgcagtgcatccagcagcccttgcttcgccagttcgcgatcctgatacagaccgcgcagtaccacttcatccggatacagccccagggttttgcccagcgttagatccccgcactcccagtaaccgcgcagcgttggcaggtcatgtgtcgccgcaaccgccatgctctgctccggatacgctttcggtgcacggaacgtcttctcgtggtcgttttcgaaatagagcactttgtaagagtacacaccgctgctgcgcagcttaccgacaatctctaccggtacggtaccgagatcttcaccaatcaccatacagcgatgacgtttactttcgagtgccagaatgctgagcagatcatccaccggatagtgaacatacgcgccctgatctgccgtctcgccatacggtatccaccacaaacgcagcatgctcatcacatggtcaattcgtaatgcgccgcagttttgcatattggcacgcaacagctcgataaacggttcataggcacgcgcggtgatgatatgcgggtccattggcggtaatccccagttctgccccaacgggccgaggatatccggcggcgcgccaacgcttgctttcaggcaatatagttcacggtcacaccaggtttccgccccaccttccgctacgccaaccgccagatcacgatacaagccaatcggcatttcatagccctggcttatctcccagcaggcggcaaactggctgtaagccagccactgcaaccagagataaaaatcgacgtcatcacgatgttcttcgcagaactgacgcacttctggactatccacgttctgatacatctctggccatgcaggccagccccagcgcatttcgtcctctttcacttgctgggcatgtagcgcatcaaaggctgcctgccagaacaggctgtcgccctgctctgcaacaaactggcgaaacgcggccatctgctcatcatcacgttgcgcgaaacctttccacgccattcgtaatgctgtcatttttagggcggtaaccgtggagtaatcgacccagtcggcatcgcgcgcctgttgcagcgtctgttgcgtggtcggcaactgccaccaggcctgagcctcttcgctaagatggaaatcttcaacggcgttaacgtcgatataaatcacattcagccaacggcgagaagacgggctgtatgggctggcgctctccggatttgccggatagagcgcatgaatcgggttcaggccaatgaagctcccgccacgttttgccacatccaccagcatcgctttgagatcgccaaaatccccaataccccagtttttttcgcttcgcagcgtataaagctgaacgcaggcaccccacagcttttgtttattcagcaacgcctgcggttcgtaacagcgtttcggggcgacaatcacccggcaatgcgcgcgctggtcgtcctgggtgagtgtcagcgtgtgataaccttccggcagcttcgtcggtagattgaacgctttgccccccgttacatggcctttgtactgcgttccttcttcggtggtcagcagccagctatattcgccgctgccctccaccaccatcggcatttttttgccgctggtataaaccatgacattcgggactggcgttaccgccactttcgtggcggtacgttgatgcatcgcgtcaagcaaacgccgtttggtttcggcgctaatgctctgcggtttaccgtgggcattgatgtaattggggctaatccccgccgccagcgcggcattatccagacgtttgctttccatcgagcttccttagcgttttgcctgccagatacgagcctgataatcgcgaatagagcgatcgctgctaaacataccgcagcgggcggtattgaggatcgccgcgcgagtccaggcctcctggtcgcggtacagcacatccacctgcttttgtgcctctacataggctgcgaaatccgccatcaccagatacggatcgccgccctgtttgccgatactgtgcagcatctggtcgaaggcatgcttatcgccgtcgctgtatttaccgctttccagctctttcaatactgcgtccagcaccttatctttcttccgccatttcaccgggtcgtagcctttggccagaattgccttcacttgttccacggtatgaccaaaaataaagatattttcttcaccgactttctcggcgatttcaacgttcgccccatccagcgtaccgacagtaagcgcaccattgagcgccagtttcatattgccggtaccggaagcttctttacctgcagtgctaatttgttcggagatatccgccgccgggatcagtttttccgccgcgctaacgcaataatccggcaggaacaccaccttcaacttatcgccaaccagcggatcgttgttgatcacgtcagccactttgttgatcgcaaagataatattcttcgccaggtagtagcccggtgccgctttcgcgccgaagaggaagacgcgcggtacgcgatcagcctgcgggttttcacgaatttctttgtacaacgccagaatatgcagcagattcaggtgctggcgtttgtactcatgcaaacgtttgatctgaatatcgaaaatcgcctgtggattgatctcaataccggtacgaactttcacaaactccgccagacggactttattcgcctgcttgatctcgcgatattgctgacggaatttcgcatcatcagcgaatttttccagattgatcagctgatcgagatcgttagcccactctttttgcagacttttatccaacagagccgccagtgccgggttgcactgtttgatccagcgacgtggggtaataccgttggtgacgttatggaatttgttcggccatagctggtgatattccgggaacagatctttcaccaccagatcgctgtgcagcgccgcaacaccgttcaccgcgaaaccgccaaccacacacaggttcgccatatgcacttgtttgtcgtgcaccaccgccagtttggcccacactttttcatcgcccggccaggttttctctaccagcgttttaaagcgagtattaatttcgttaataatctgcatgtggcgcggcagtaagcctttcaccagtttcacatcccagcgttccagcgcttctggcatcagggtatggttggtgtaagcgaaagttttgctggtaatggcccaggcgtcatcccagctcatctggtgctcatcgatcagcacgcgcagcagttctggaatcgcgatagttgggtgggtatcgttcagctgaataacttcgtaatccgccagttcgtgcagtttacgccccgccagatgatggcgacgcaaaatatccgctacgctacaggcacactggaagtattgctgcatcaggcgcagctttttaccggcagtatggttgtcgtttggatagagaactttggtcagtttttccgcattgatgccctgctgttcggcacgcaagaaatcaccgtcgttaaatttagtcagatcaaacggatgcgcgtgcgtcgcctgccacagacgcagcggctgcgccacgccattacgatagccgacaacggggagatcccacgcttgaccggtaatggtaaactccggctcccagcgtccgtctttcgtcactttaccgccaatccctacctgcacatccagtgcttcgttgtggcggaaccacgggtagttactgcgatgccagtcatccggcgcttcaacctgtttgccatcgacaaaagactggcggaacaaaccatattgatagttcagaccgtaacccgtcgcagactgaccgacagttgccatactgtcgaggaagcacgccgccagacgtcccagaccaccgttacccagcgccgggtcgatctcttcttccagcaggtccgtcagattgatgtcataagccttcaagctatcctgtacatcctgataccagccgagattcaacaggttgttgcccgtcaggcgaccaatcaaaaactccatactgatgtagttaacatgtcgctgattcgccaccggcttggcgaatggctgagcacgcagcatttcggccagtgcttcactcactgctagccaccactggcgaggagtcatttcagccgcagaatttaagccataacgctgccactgacgactaagcgcttcctgaaattgcttatcgttaaaaataggttgactcataggagttccacttttcttagattttcaacacaacgttatcgctagtttgccaggctcgatgttgaccttcctcatcctgcgggggattaggcagggaggagttgcggggatgagcaaggaaatgtgatctcaaccacttaaagctagtgcaaaccacaggattagcatcaaatcaatgcaatacagcgcagaaaatctgtatctaagtgcaaaaaatggccgttgcgtattttcaaaaagcggaaggtaactctataaattaagtaaaggagtgaaacagtttcataagtaaaatatccagtgtgctccatctcattcttaatagatttattaagatcatctttttagatggcactttcatcaggaatgaagaagaaacccttgcttaaatgaatctgatgaacataagggaaaccagtattcacgctggatcagcgtcgttttaggtgagttgttaataaagatttggaattgtgacacagtgcaaattcagacacataaaaaaacgtcatcgcttgcattagaaaggtttctggccgaccttataaccattaattacgaagcgcaaaaaaaataatatttcctcattttccacagtgaagtgattaactatgctgattccgagtaaactaagtcgtccggttcgactcgaccataccgtggttcgtgagcgcctgctggctaaactttccggcgcgaacaacttccggctggcgctgatcacgagtcctgcgggctacggaaagaccaccctcatttcccagtgggcggcaggcaaaaacgatatcggctggtacagcctggatgaaggtgataaccagcaagagcgtttcgccagctatctcattgccgccgtgcagcaggcaaccaacggtcactgtgcgatatgtgagacgatggcgcaaaaacggcaatatgccagcctgacgagtctcttcgcccagcttttcattgagctggcggaatggcatagcccactttatctggtcatcgatgactatcatctgatcactaatccagtgatccacgagagtatgcgcttctttattcgccatcaaccagaaaatctcaccctggtggtgttgagtcgcaaccttccgcaactgggcattgccaatctgcgtgttcgtgatcaactgctggaaattggcagtcagcaactggcatttacccatcaggaagcgaagcagttttttgattgccgtctgagtagcccgattgaagccgcagaaagcagtcggatttgcgatgacgtttccggttgggcgacggcactacagctaatcgccctctccgcccggcagaatacccacagtgcccataagagcgcacgccgcctggcgggaatcaatgccagccatcttagcgattatctggtcgatgaggttttggataacgtcgatctcgcaacgcgccattttctgttgaaaagcgccattttgcgcagtatgaacgatgccctcatcacccgtgtgaccggcgaagaaaacgggcaaatgcgcctcgaagagattgagcgtcaggggctgtttttacagcggatggatgataccggcgagtggttctgctatcacccgctgtttggtaacttcctgcgccagcgctgccagtgggaactggcggcggagctgccggaaatccaccgtgccgccgcagaaagctggatggcccagggatttcccagcgaagcaattcatcatgcgctggcggcaggcgatgcgctgatgctgcgcgatattctgcttaatcacgcctggagtctgttcaaccatagcgaactgagcctgctggaagagagccttaaggccctgccgtgggacagcttgctggaaaatccgcagttggtgttattgcaggcgtggctgatgcaaagccaacatcgctacggcgaagttaacaccctgctagcccgtgctgaacatgaaatcaaggacatcagagaagacaccatgcacgcagaatttaacgctctgcgcgcccaggtggcgattaacgatggtaatccggatgaagcggaacggctggcaaaactggcactggaagagctgccgccgggctggttctatagccgcattgtggcaaccagcgtgctgggtgaagtgctgcactgcaaaggcgaattgacccgcagtctggcgctaatgcagcaaaccgaacagatggcacgccagcacgatgtctggcactacgctttgtggagtttaatccagcaaagtgaaattctgtttgcccaagggttcctgcaaaccgcgtgggaaacgcaggaaaaagcattccagctgatcaacgagcagcatctggaacagctgccaatgcatgagtttctggtgcgcattcgtgcgcagctgttatgggcctgggcgcggctggatgaagccgaagcgagcgcgcgtagcgggattgaagtcttgagctcttatcagccacagcaacagcttcagtgcctggcaatgttgattcaatgcagcctggcccgtggtgatttagataacgcccgtagccagctgaaccgtctggaaaacctgctggggaatggcaaatatcacagcgactggatctctaacgccaacaaagtccgggtgatttactggcaaatgaccggcgataaagccgccgctgccaactggttgcgtcatacggctaaaccagagtttgcgaacaaccacttcctgcaaggtcaatggcgcaacattgcccgtgcacaaatcttgctgggcgagtttgaaccggcagaaattgttctcgaagaactcaatgaaaatgcccggagtctgcggttgatgagcgatctcaaccgtaacctgttgctgcttaatcaactgtactggcaggccggacgtaaaagtgacgcccagcgcgtgttgctggacgcattaaaactggcgaatcgcaccggatttatcagccattttgtcatcgaaggcgaagcgatggcgcaacaactgcgtcagctgattcagcttaatacgctgccggaactggaacagcatcgcgcgcagcgtattctgcgagaaatcaatcaacatcatcggcataaattcgcccatttcgatgagaatttcgttgaacgtctgctaaatcatcctgaagtacctgaactgatccgcaccagcccgctgacgcaacgtgaatggcaggtactggggctgatctactctggttacagcaatgagcaaattgccggagaactggaagtcgcggcaaccaccatcaaaacgcatatccgcaatctgtatcagaaactcggcgtggcccatcgccaggatgcggtacaacacgcccagcaattgctgaagatgatggggtacggcgtgtaagtttagccggataacgcgccagatccggcttacatctctgcatcattcaatgctcacccgcgttacgccatctgtttctatcaaactaaaccgcaccggcaagaaacgctccaccaccgcgatattggtcagcagatggcaactgggatgggcgaccgtaaattcccccgcgcccgccagcgccatcggtagcaccagttggtcagcaagatattcccccaccgccgccgtgcttgccaggtagcgtttcacctctttcaccaactgtgccgcaaccacctcggcactgacgcgcttttcaccgacgacaaaaaagcgttcggtgatattttcactttcgacttcaaggctgacggtattacccggcccctggtcgcgcggcaggttatgaatattctgttcatgcagggaaaaactccccgccagtgtagcgatttcacgctcagcaacatggcgcggcacaccagctaatagaacttctccacgcatctgcacaatgttcccgcgctcgccaagttgcaaggtgttaaagcttgccacggggctgacttccgttgccaccacaccgcctccggcagggtaaaaaccgtggcgtaacagcgtggtttgctgatgaattcctattttcgccagcagcggctccagcacccggcggataaaatccgcaggcggcgcgctcgggttatcggtgccgccgctcacttcaacacggctaggtccatcggcaaaccacagcgcgggcagcaccgtttgcagcaccagcgtacaacttccggcgctaccgatagcaaagcggtaatcgccgccgcgcacggtgccgggccggaagagcagacgctggctccccagctccgcgccttccacggttgctccgcaaatttccgtcgccgcctttaccgcggtcagatgctggcgcaacagccccggtttcgcccgcccggcacgaatgctggtgatggtaaatggctggccggttatcatgctcaggctcagcgcgctgcgcaggatctgcccgccaccttcgccctgtgcgccatccagcgcaatcatccttttcatcatttatccttttacgcacaccacctgacgcagggtatagataacttccaccagatcgctttgtgccgccatcaccgcatcaatatctttatacgccatcgggatttcgtcgatcacttcggcatctttacggcattccacatgcgcggtggcacgaatttgatcttccacgctgaacagttttttcgctttagttcggctcattacccgcccggcaccgtggctgcagctacagaagctctcttcatttcccagcccacggacgataaagctttttgctcccatgctaccgggaataattccatattgaccagcacgcgcagacaccgcgcctttacgcgtcacgtagatctcttcaccaaagtgctgttctttttgcacatagttgtggtgacagttgatctcttccatcgccagcgtttgtggctgtctgaccgttttctgcgtaatgctctgcaatgccgttaccacgttttccatcatcgcatcgcggttaaggctggcaaaaagctgcgcccaggccacggctttcaggtaatcatcaaagtattccgtaccttccataaagtacgccagatcacggctcggcaacgtctcaagcgtttcctgcatctctttttgtgccagatcgataaagtaagtcccgatggcgttaccaattccgcgactaccggagtgcagcataatccacacctggtcgctctcatcaaggcagatttcaataaagtggttaccggttcccagcgttcccaggtgtttatagttattggtattcaggaaacggggatatttttgcgttaaccactgataaccggcttcaagctcagcccatttagcatcgacgttaacaggtggattttcccaggcacctttatcacgtttacaacggccagtggtacgcccgtgcggcacggccgtttcaatcgcctgacgcagctctgccaggttttcaggcaggtcttccgccgttaacgcggtacgcagcgcgttcattccacagccaatatccacgcccaccgccgccggaataatcgcccctttggtcgggatcacgctaccaatggtggaacctttacccaggtgtacatcaggcattaccgcaatatgtttgaaaataaacggcatcttcgccgtattaataagttgctgacgcgcatcggcctctaccggcacgcctttggtccacatttttaccggggcattttcagtggtcagtaattcgtaattcattttgtttttctcttttcgttgtttgctgtcctgataattgcaaccgtcgtgccagaaaattaaataagcagcttaattttttaattcattgttttaaaaaagattatatctttacgtccgtaaccggagatttcccgcaaagccaatttaccgataatgaaatatcgtcttttataaggatatctaagatgcgtaaaacagtggcttttggctttgtcggtaccgtactggattatgccgggcgcggcagtcagcgctggagtaaatggcgtccgacactctgtttatgccagcaagaaagcttggtcatcgatcgactggaattgttgcacgacgcccgcagccgcagcctatttgaaacgcttaaacgcgatatcgccagcgttagcccagaaacagaagtggtgagcgttgagattgaactgcataacccgtgggatttcgaagaggtctacgcctgcctgcatgatttcgcccgtggttacgagtttcagccagaaaaagaagactatttaattcacatcaccaccggtacccacgtcgcgcagatttgctggtttctgctggcagaagcgcgttacctgcccgcccggctgatacaatctagtcctccgcgcaaaaaagaacagccgcgcggcccaggtgaagtaacgattatcgatctcgatttaagccgttataacgccatcgccagccgctttgccgaggaacgccagcaaacgcttgattttcttaagtccggcattgccacgcgtaacccccacttcaaccgcatgattgagcagatcgaaaaagtggcgatcaaatcccgcgcgccgattctgcttaacggtccaaccggcgcgggcaagagttttctggcgcgacgcatcttagagttaaaacaggcgcggcatcagtttagcggcgcgtttgtggaagtgaactgcgccaccctgcgcggcgataccgccatgagcacgctgtttggtcatgtaaaaggcgcgtttaccggggcgcgggaatctcgtgaaggtttattacgcagcgccaacggcggaatgttgtttcttgatgagattggcgaactgggcgcagacgaacaggcaatgctgctgaaagccattgaagagaaaaccttttacccgtttggcagcgatcgccaggtgagcagtgattttcagcttatcgccggaacggtgcgcgatttgcgccagctggttgccgaaggcaaatttcgcgaagatctgtacgcgcggatcaatctctggaccttcaccctgccgggtctacgccagcgccaggaagatattgaaccgaacctggattatgaagtggagcgccacgccagtctcactggcgacagcgtgcgttttaacaccgaagcgcggcgcgcctggttggcttttgcgacctctccccaggcaacatggcgcggtaactttcgcgaactttctgccagcgtcacgcggatggccacctttgccactagcggacgcatcactctggacgtggttgaagatgagataaaccgtctgcgctataactggcaggagagccgcccctccgcgcttacggcgttgctgggcgcagaggcagaaaacatcgatctcttcgaccgtatgcaactggaacacgttatcgctatctgccgccaggcaaagagcctttccgcagccggacgccagctttttgacgttagccgccagggcaaagccagcgtcaatgacgcggatcggctacgcaaatacctggcgcgttttggtctgacgtgggaagccgtgcaggatcagcacagctccagttgaatatggtggtccgtcagcacctgcatcacgcttactggcggcggggcgtcggtgtagacggcatctaccatgctgatgctgcccatattgaccatcgcgttacggccaaatttcgagtgatcgacaaccagcataacgtggcgcgagttctcaataatggcgcgtttggtgcgaacttcgtggtaatcgaactccagcagcgagccgtcgctatcgatgccgcttatccccagaatgccgaaatcaaggcggaactgggagataaaatcgagcgtcgcttcgccaatgatcccgccatcgcggctgcgtaattcgccaccggcgagaatgatgcgaaaatcttcttttaccatcaacgtgttagcaacgttgagattgttggtgacaatgcgcaaattgctgtgattgagcagtgcgtgcgctaccgcttccggcgtggtgccgatatcgataaacagcgtcgagccattggggatttgctccgccactttgcgggcgatgcgctctttttcttcggtctgggtggccttgcgatcgtgccacggcgtgttaaccgaactggaaggcagcgccgcaccgccatgatggccaggatcaggttttgctccgccagctcattgaggtcgcggcgaatagtctgcgggctgacggagaaatgctctaccagctcttcggtactgacataaccctgctgtttaaccagttcgataataccgttgtgacgttgtgtttgtttcatttataaatccctggaattattttcgttttcgcgcattgaggctatcaacaaaagccatcgctaaacccacggctaacccggcgatgtgtgctccgttcgccatgctcatcccaaacaaatcaaaccatccggcgacaatccagatcagcgcaaagataattaacccacgttgcaggtaaatgccactttgcggatcgcgttcgccacgtagccagacgtagcccatcagcgcatacaccacgccagaaagcccgccaaaccacggcccgctgaatttttgctgcacatagccgcttaacagggcgctgataagcgtaatgacaattagcttaccgctaccgaggcgtttttccaccgcaccgccgagataccaccaccagagcaggttaaagaggatatgcatcaggctgaagtgcattaacgcgtgggtgaagtaacgccagaactcaaatttcagtgttggatcgaatggccaggccagccataacatcacttcctgatcgccgagaatttgcatggcaataaacaccaccacgcaggcgatcatcatcacccaggttaccggacctgcgcgttcacgcaaggcggcaaagaaaggataacggcgataatgcaggccactgccggtatggcctgcctgccagctcgccgccagataacgcggatctgccgggttttcgagaaaacgcgccagctccgcccgtacgcgctcggcctgggactcatccgccagccagacatcgctttggttatgttgttgaatcgtgaggataacaccctgcgtcgccatgtaatcaacaaacgcctgcgccacgcgggggttagcaaaagaggtaatcatcaacatcgttgctgtcgcttattccacacaaaaggggacagtataaagcgttacgcgccgtacgccacctctgcgggaaactgacgttgccaggcttcaaagccgccgtcaatgctatagaccacatcgtagccctgttgcagcagatactgcgccgcgcctttgctgctattgccgtgataacacatcaccatcaccggagtgtcaaagtcgttatcacgcataaaagcgcccagcgtgtcgttggttaaatggaaagcctgcaccgcatgtcccattgcgaaactctgtggatcgcgaatatcgaccagcaccgcctctttttcctgcaacttctggtgcgcgtcggcaacgttaatacattcgaactgatccatgcgtctctctttctttacaaacaagtgggcaaatttaccgcacagtttacgtcgaagcggcagataaacgccataatgttatacatatcactctaaaatgttttttcaatgttacctaaagcgcgattctttgctaatatgttcgataacgaacatttatgagctttaacgaaagtgaatgagggcagcatggaaaccaaagatctgattgtgatagggggcggcatcaatggtgctggtatcgcggcagacgccgctggacgcggtttatccgtgctgatgctggaggcgcaggatctcgcttgcgcgacctcttccgccagtagtaaactcattcacggtggcctgcgctaccttgagcactatgaattccgcctggtcagcgaggcgctggctgaacgtgaagtgctgctgaaaatggccccgcatatcgccttcccgatgcgttttcgcctgccacatcgtccgcatctgcgcccggcgtggatgattcgcattggtctgtttatgtacgatcatctgggtaaacgcaccagcttgccgggaagtactggtttgcgttttggcgcaaatagtgtgttaaaaccggaaattaagcgcggattcgaatattctgactgttgggtagacgacgcccgtctggtactcgccaacgcccagatggtggtgcgtaaaggcggcgaagtgcttactcggactcgcgccacctctgctcgccgcgaaaacggcctgtggattgtggaagcggaagatatcgataccggcaaaaaatatagctggcaagcgcgcggcttggttaacgccaccggcccgtgggtgaaacagttcttcgacgacgggatgcatctgcctagcccttatggcattcgcctgatcaaaggcagccatattgtggtgccgcgcgtgcatacccagaagcaagcctacattctgcaaaacgaagataaacgtattgtgttcgtgatcccgtggatggacgagttttccatcatcggcactaccgatgtcgagtacaaaggcgatccgaaagcggtgaagattgaagagagtgaaatcaattacctgctgaatgtgtataacacgcactttaaaaagcagttaagccgtgacgatatcgtctggacctactccggtgtgcgtccgctgtgtgatgatgagtccgacagcccgcaggctattacccgtgattacacccttgatattcatgatgaaaatggcaaagcaccgctgctgagcgtattcggcggtaagctgaccacctaccgaaaactggcggaacatgcgctggaaaaactaacgccgtattatcagggtattggcccggcatggacgaaagagagtgtgctaccgggtggcgccattgaaggcgaccgcgacgattatgccgctcgcctgcgccgccgctatccgttcctgactgaaagcctggcgcgtcattacgctcgcacttacggcagcaacagcgagctgctgctcggcaatgcgggaacggtaagcgatctcggggaagatttcggtcatgagttctacgaagcggagctgaaatacctggtggatcacgaatgggtccgccgcgccgacgacgccctgtggcgtcgcacaaaacaaggcatgtggctaaatgcggatcaacaatctcgtgtgagtcagtggctggtggagtatacgcagcagaggttaagcctggcgagctaaattaacgtaaggtgatcaggtcagatttcaatctggcctgagactgatgacaaacacaaaactgcctgatgcgctacgcttatcaggcctacgtggtttatgcaatatattgaatttgcatggtcttgtaggccagataagacgttcacgtcgcatccggcatgaacaaagcgcactttgtcaaaaatctaacctactttttaattcagggaattaccgcaaagcccacgccatcatacccaacgtaacaaaactcaggcacgttccccactcgcccgctgaaaaatagcattaatgcgcccagcgccagcataaaaattttgagcagaaggtaaattgttggcgtgataaggatattacaaacttcaataataccggcaagtccgacacccagcatggcaataaccaccgccaaaaattgcgccagtatggggatgccgaaaaaagtcattaccaggctggtcaaaatccattttctgttttgcattattctttccattctttttgaatggtgaaattatactccccgagtccccttgccccttctggacacttttccgaaatgatggcggaaaaaaacgggaccctttggccccgttctatttattggtgaacttacaatctcaccggatcgatatgccagatatgatcggcgtactctttgatagtacggtcagaagagaagtagcccatattggcaatgttcagcatcgcttttgcggtccactcttcctgaagctcgtagagttcatcgactttatcctgacaatcgacatagctgcgataatccgccagtacctggtagtgatcgccgaagttgatcaggctatcaaccagatcgcgatagcgacccggatcttccggactgaatacaccgctgccgatttgcgtcagcacctgatgcagctcctcatctttctcgtagtattcacgcggtttgtagccctgacgacgcagttcttccacttcttccgctgtgttaccaaaaataaagatattgtcagcaccgacatgatccagcatctcgacattcgcaccgtccaacgtaccgatagtcagcgcaccgttaagcgcaaacttcatgttactggtgccggaagcttccgtccctgccaggctaatctgttcagacagatctgccgccggaatgatcaactgcgccaggctaacgctgtagttcgggatgaacacgactttcagcttatcgccaatctgcggatcgttgttgatcactttcgctacgtcattgatcaaatgaataatgtgcttcgccatgtaataggcgctagccgccttaccgccaaaaatattcacgcgcggtacccacttcgcatccgggtcggccttgatgcggttatagcgggtaatcacatgcaacacattcatcaattgacgtttgtattcgtgaatacgtttgatttgtacatcgaacaacgcctttggattcaccaccacattcagctgctgggcgatatactctgccagacgctttttgttctccagcttcgcctgatgcacagcgtgattaaccattgggaaatcacagtgttgttgcagctcattaagcaggctaaggtcggtgcgccagttacggcccaggtgttcgtccagcacggcactaaggcttgggttcgctaccgccagccagcgacgcggcgtcacaccgttggtgacgttggtgaaacgacccgggaagattttcgcaaagtcggcaaacaagctttgcaccatcagattagagtgcagttcgcttacaccgttaactttgtggctcacaacaaccgccagccaggccatacgcacacgacgaccgttggattcatcaatgatgctcgcccgtcccagcagatcggtatcgttcggatactgttcctgcaaggttttcaggaaatagtcgttgatttcaaagatgatctgcaggtgacgcggcagaattttacccagcatatcaaccggccaggtttccagcgcctcgctcatcagcgtgtggttagtgtaggagaagacctgacaacacacctcaaacgcgtcgtcccagctaaattggtgctcatcgatcagcagacgcatcatctcaggaatgctcagtaccggatgggtatcattgagatgaatcgcgattttatccgccaggttatcgtaggttttatgcaactgataatggcggcttaaaatgtcctgaatggtgctggaaaccaggaagtattcctgacgcaggcgcagctcacgcccggagtaggtggagtcatccggatacagtacgcgagatacgttctcggagtggtttttatcttccactgccgcgaagtagtcaccctggttgaatttaccgaggttaatttcgctactggcttgcgcactccacaaacgcagcgtgttggtcgcgtcggtgtcgtaaccagggattatctgatcgtaagcgactcccagaatctcttcggtttcaatccagcgcgtttttttaccttcctgctgaatgcgaccgccaaaacggactttatagcgcgtgttgtggcgtttgaattcccacgggttaccgtattccagccagtagtctgggctctctttctggctaccgttaacgatgttctgcttgaacataccgtagtcatagcggatgccgtaaccgcgccccggcaaccctaacgtcgccagagaatcaaggaagcaagccgccagacgtcccaggccaccgttaccgaggcctgggtcattttcttcatcaatcagctcttcgagatttaaccccatcgcttccagtgcgccctgtacatcttcgtaaattcctaggctcaacatggcgttggagagcgtacggccaatcaaaaactccatgctcaggtagtaaacctgacgagtttcttggctcaactgggcacggttactacgtaaccagcgctccacgagacgatcgcgcacagcaaataacgttgcgttcagccattcatgtttattggcgacgaccgggtcctttccaatcgtaaacatcagcttgtaagcgatagagtgcttaagagcttctacgctaagcgtggggctactatatgtaaacggagcattcatataggcgtttcctgaaaattatttcaagcgatagtaaagctcacggtagctcttcgccgcgacctgccagctaaaatccattgccatagcctgacgttgcacaaaccgccacagactaggacgggaccacagtacaaaagcacgtcgaatagcccgtaacaggctccaggcattactatcttcaaagacaaacccactggcgacgccatctgcaaggttctcaagagaacagtcagaaaccgtatcagcaagcccaccggtgcgccgcactaacggcagcgtaccgtacttcaatccataaagttgcgttaagccgcacggttcaaaacggctgggcaccagaatgacgtccgcgccgcccataatgcgatggctaaatgcttcgtgatagccaatctgaacgcccacctgaccggggtattccgctgccgccgcaaggaaaccttcctgcagcaccggatcgcccgcgccgagtagcgccagctgcccgccctgctccagaagacccggtaaggcttccagcaccaggtcgagacctttctggctggtcagacggctcaccactgcaaaaagcggcactttatcgtcaaccttaagccccattgcgatttgtaactggcgcttattttccgctttatcttccaacgtatcgcgggtgtaacggctggccaacagtaagtccgtctctggactccagattttctcgtccacgccgttcagtacgccggaaagacgcccttcacggtgacgctgttgcaacagaccttccataccgtaggcaaactgcggttcggtgatctcgcgagcgtaggttggactgaccgccgtaatgtgatcggcatagtacagaccggccttcaggaaagagatttgtccgttgaattccagcccatgaatattaaagaaactccatggcaattggatgtcattcatgtgatgtgcataaaacatgccttgataggccaggttgtgcacagtaaacacgctcttcgccggacgcccgcgcgccgccagatacgcaggcgcaaggcctgcatgccagtcgtgcgcatgcaccacatcaggacgccagaatgggtcaagcccgctggccatttctgccccaacccaccccagcagcgcaaaacgcaatacgttgtcggtataggcaaataagttggtatcgtgatacgggcttcccggacgatcatagagatgcggcgcgtcaatcaggtaaatgccaaccccgttgtaatgaccgaacaacagcgtgatatgtccggcgaaggtatcacgacgggatactacctgcgcatcggtcacgccacggcgaatatcgggaaatgcaggcaacagtacgcgagcgtcaacgccgtctgcgatttgtgctgcgggtaatgccccaataacatcagccagaccgccggttttaagcagcgggaacatctcactacatacatgtaaaacctgcattatcgctcctgtttatgccctaacttccgtagcatttcgcgcgttaccagcacgatgccttcttcactacgatagaaacgacgtgcatcttcctctgcgttttcaccaatcaccatgccttccggaataacacaagcacgatcgatgacgcagcggcgcagacggcagctgcgacctacccatacttccggtaacaatacggcggaatcaatgttgcagaaactattcacgcgaacgcggctgaacagaacggactgcaccaccacgctaccggagatcacacaaccgccggaaaccagactgttaagggtcatcccgtggctaccggagcgatcctgcacgaatttcgctggcggtaaactttcattgtaggtgcgaattggccaattgcgatcgtacatatccagttccggcaccacagaggccagatcgaggttcgctttccagtaagcttccagcgtacccacatcgcgccagtacggctcggcatccgggtcggattgtacgcaagagagcgggaacgggtgcgcataggccagaccggcttcggtgatcttgggaatcaaatctttgccaaagtcgtggctggagttctcatcgcgatcgtcttcttccagcagttcatacagatagtcggcgtcaaagacgtagatacccatactcgccagagatttgctcggatcgttcggcatactcggcgggttagcaggtttttcaacgaattcgataattttatcgttctcatcaaccgccataacgccaaatgcggaggcttcttcaatcggtactggcatacaagcaacggtgcaacgtgcgcctttttcgacgtgatcgataagcatacggctgtagtcttgcttgtagatatggtcgcccgccaggatcaccacgtattccgctttataacggcggataatgtcgaggttttgggtgaccgcatctgcggtgccgcgataccagttttcccctttcattctctgctgtgctggcagcagatcgacaaactcgttcatttcttcattgaagaaactccagccgcgctgaatgtgctgcaccagagtgtgggactggtactgggtgatcacgcccatacgacggatcccggagttgatgcagttagacagcgcaaagtcgataatgcggaacttaccgccgaagtgtacggccggttttgctcgcttattggttaaatccttcaggcgggtaccacgtcctcccgccagtatcagggcaacagatttcaatggcagctggcgcgccaacattaagtgatcgttcttctctaaactaaccatgactaactccttttttatcatctctggaacacacacaatccgtgtgcaggtccctgccagacagccgtaatcactgggttatcctctccagcgaatgggggaatggcgtgccactccccagcaggtaaaacaatctctgttacctcaagcgtggcgttaattgcgatcaaaaagcgatcgctgagcagaatttgcagctgtttcggcccgttttgccactcatccgtgcttaaaggttgagcatatcgatttagccaacggacattgccgtcgccttcttcccaccagcgattctccaccaaagcgggaatgcgcttgcgcagatggattaacgcggcggtaaatgcggttaaaccactgcttgcctggctccagtccaaccaggttaattggttatcctgacagtaggcattgttattgccatgctggctgtgaccatgttcgtcaccggccagtaacatcggcgtaccctgggagagcaacaacgttgttaacagggcgtgaatgctgtcgcgccgccgttcaaccaggtcaagagaaccgcctaacccttctttaccatgattgttactgtaattgttgttggtcccgtcgcgattttcttctccgtttgcttcattgtgtttatggttgaagcaaacgcagtcgcgaagcgtaaaaccgtcatgcgcggtgacgagattaatcgcggcactcggcagacgaccattacgtttaaaaacatcgctggaggcagcaaaacgcccggcaaacgcccccagaggcaaatcataatgtagccagaaacgacgggcagcatcgcggaaatgatcgttccactcggcaaacagcggcgggaaatttcccacctgataaccaccaggagcgatatcccacggttcagcaattaacttcacctggctgagcaccgggcagttctggatagcggtaaacaacggcgcatcctgacggaactctggcgtacggcccatgactgccgccagatcaaagcggaaaccatcgacgtggcaggtttctacccaataacgcaggcaggcgctggcataatccaccaccgccggatgactcaaattgagcgtgttgccgcaaccggtccagttgtgataatcgccgtcttctcttatccaataatagctacggttatcgatcccacgcaggctgaataacgggccgtcgaggtccagttccgcactatggttgagcacgatatcaagaatgacttcgatacccgctttatgcagtgctttgattgcatcgcgaaactcatccagcgccgtttctgggctgcaggcatacgccggatgcagcgcaaacatcgccaccgggttgtaaccccagtagttacttagccccatgcgttgcagacgtggttcactggcaaactgcgccactggcagcagttccagcgcggtaatgcccaattgtttcaaatagttgatcatcaccggatgcccgagggctttataagtgccacggatctcgaccgggatctccgggtgcaagtacgttaatcctttgacatgggcttcataaatgatggtgctgccccacggcgtgcgcggcggggcatcatcttcccagtcatagtgatcaaccaccactacgcatttcggcgcaatggcggcgttgtcgcgatagtcaggttcattatgaccggcgtgcagcagcgggttatctttaaactccccgtcaatttgccgcgcgcaaggatcaatcaacaacttcgccgggttaaagcgatgcccctcggcgggttgccaggggccatgaacgcgataaccataacgcaaacccgggcgcgcatccggcagataaccgtgccaaatgtcgccactgtgccctggcaagtcatagcgatgttcctggccattggcgtcaaagacacacagttctacccgctcggcatgagcggagaaaagtgtgaagttgacgccctgaccgtcgtaatgcgcgccgaggggagcgggtttgccaatggcgagttgtgtcattctgcctcccgaaccagccagatagtggccagcggtggtagcgtcaggcttagactatgctgacgaccgtggctggcaatctcatcgctgtgtaccgtgccgccattgcctgcattactgccgtgatagtgcatggaatcggtattgaggatttcacgccatttgcccggctggtttatgccgaagcgataatcatgacgcggtaccggcgtaaagttactggcaacgatgatttcgttaccctctttatcgcgacgcacaaagatcagcacgctgcgttctttgtcatccaccaccagccattcaaagccgtacgggtcaaaatccagttcatgcattgctttatggtggcggtaggtgaggttcagatcgcgcaccagacgctggacaccgtggtgccagttatcgccgccttccaacagatgccagtcgaggctggcgtcatggttccactcgcggccctgggcaaattcgttacccatgaacagtagtttcttgcccgggaatgcccacatccagccatagtaggcgcgcaggttcgcgaatttctgccatgcgtcgcccggcatgcggtcgagaatgctttttttaccgtggaccacttcatcatggctcaacggcaggacgaagttttcagtgtagttgtagagaatcccgaaggtcagtttatcgtgatgatactgacgataaaccgggtcgagcttcatgtagtccagggtgtcatgcatccagccgaggttccacttgtaccagaagcccagaccgcccatatcctgcggacgagaaacgccagggaaatcggtagactcctcagccattgtcaccgcaccggaaacctgctcaccaagaatacggttggtattacgcaagaattcaatcgcttcaagattctcgcgcccgccaaattcgttcgggatccactccccctctttacggctgtagtcgcgataaatcatactcgccaccgcatcgacgcgcagcgcatcaataccaaaacgttcaatccagtaaagcgcgttaccgacgaggaagttactgacttcacggcgaccatagttgtagatcagcgtgttccagtcctgatgatagccttcacgcggatcgctgtgttcatacaagttcgtgccatcaaattcggcaagcgcaaagtcatcagtcgggaagtggcctggcacccagtcgagaatcacgttcagaccagctgcgtgtgcggcatcaatgaaataacggaagtcgtcgcgagtaccaaaacggcgggttggcgcatacaggccggttggctgataaccccaactgccatcgaagggatgctcgttaatgggcagtagttcgaggtgggtaaagcccatccatttagcataaggcaccagttgatcggccagctcgcggtagctcaaccagaaattgttgtcggtgtggcgacgccaggaacccaggtgaacttcataaatagagattggcgcatcaaactgattcgcttttttgcgctcttcagtctgtacaaccttttccggcagcccgcaaataagagacgcggtttccgggcgcatttgcgcttcaaaggcataagggtcggacttcagacgcaagttgccattggcatcaatcatctcgtatttatagagctgaccgttatgcgccccagggataaacagttcccagatgccgctctctttacgcaggcgcatcgggtgacggcgaccgtcccagtagttgaattgcccaaccacgctgacccgacgggcgtttggagcccagacagagaaacgcgtacctgtgacgccatccatagtatctgcatgcgcgcctaaggtttcatacgggcgcaggtgagtaccttcagataatagccaggcatccatttcctggattagcggaccaaaacggtaaggatcatcaatcaggttttgctgaccatgccagacaacagccaactgatagcggaaaaaattcttacgtcgcggaatgacgccgctaaagaatccccgactgtcgagacactccagttttgcgagtttgcgcccggttttcggttcaatcacccacacatcggtagcgtcgggtaaaagggcacggacttccagtcccgcggtggttttatgcattcccagtacggaaaaaggatccgcaaaatggcctgcaattagcgcgttaatcacgtctctatcgatacgatcggacatgcttgtcttcctgttttattgtgtcaccccatccaattggatttttgacttctggttgtgacatttttttgacctgaacggcgcagcactctgtgcatcctctctgcgtcgtcctcacttcaggtaaggctgtgaatactcatgtattcagccacccttaaagaatagccaatgctctatttaactcccggtaaatcatgaaacatctgcgcttactcctgtattacgcactaacaggggcggcatcgcgccccagatttaatgaataaagattacgccagttgacgaagcatccgacgcagcggctccgcggccccccacagcagctggtcgcccacggtaaaggcactcaggaactctggtcccatattcagcttacgcaggcggcctaccggcgtggtcagcgtgccggtaacggcagctggggttagctcacgcatagtgatttcccgatcgttcggaacgactttcgcccacggattgtgcgcagccagcagttcttccacggtcggaatagacacatcttttttcaatttaatagtgaatgcctggctgtggcagcgcaatgccccgacacgcacacataaaccatctaccggaattacggaagatgtgttgaggatcttgttggtttccgcctgccctttccactcttcgcggctctgaccgttatcgagctgtttgtcgatccacggaatcaggctacccgccagcggcacgccaaagttatccaccggcagctcaccgctacgggttaaggttgtgactttgcgttcgatatcgagaatagcagaggacggggtcgcgagttcatctgccacatggccatacagatggcccatctgggttaataactcacgcatatgtcgcgcaccaccgccggaagcggcctggtaggttgcaacggacacccaatcaacaagatcattggcgaataaaccacccaagctcatcaacatcaggcttacggtacagttaccgccaacaaaagtcctgatgccattatttaatccgtcggtaatgacgtcctgattgacggggtcaagaatgatgatggcgtcatctttcatgcgcagagagcttgctgcgtcaatccagtaaccttgccatccgctttcacgaagctttggatagatttcgttggtataatcgccgccctgacaggtcacaatgatatcgagggcctttagcgcctccagatcaaaggcatcctgaagtgtgccagtggttccgccaaaagacggcgcagcctggccaagctgagaagtagaaaagaagacagggcgaatggcgtcgaagtcgcgctcttcaaccatgcgttgcatgagaacggagccgaccataccgcgccagccgataaaaccaacatttttcataagcgtttttttcctgcaaagatgtgtgctgtataaatgtgccggtctcctcttggcacatctttcaccatacaaaaagcagccaaagtcgcaagtgaaattaatcaatgatagcgaagccatcagtaatgcgacttatcctgctttgttagcacgcagaaagtccgcggcaattatcagggaatttgagttatgaatgaaatcatttctgcagcagttttattgatcctgattatggatccgctcggaaacctacctattttcatgtccgtactgaaacatactgaaccgaaaagacggcgggcaatcatggtgcgagagttgcttattgctctcctggtgatgctggtgttcctgtttgcgggtgagaaaattctggcatttcttagcctacgagcagaaaccgtctccatttctggcggcatcattctgtttctgatcgccattaaaatgattttccccagcgctagtggaaatagcagcgggcttccggcaggtgaagagccatttatcgtgccgttggcaattccgttagtcgccgggccgactattctcgccacgctgatgttgttgtctcatcagtacccgaatcagatggggcatctggtgattgctctgctgctggcctggggcggcacctttgtcatcctgctacagtctagcctatttttacgtctgctgggcgagaaaggggtgaacgcacttgaacgcctgatgggattgattctggtgatgatggcaacccagatgttcctcgacggcattcgaatgtggatgaaggggtaacgaggagagtttttcgaaaagaacccggtagcgtcacaactaccgggcgaacaaacttaactcaacagctggaacgcaatcatcccaacgatggcaccgacagtgccgaggatggtttccatcatggtccaggttttcagcgtttcggcttcggtcgcgccggtaaatttaccgaacaaccagaaaccggcgtcgttaacgtggctgacaacaatgctaccaccagcgatacaaatgctcagcgccgccatttgcgcaccggagtagttcagttgttcaataaccggcatcaccagtcctaccgccgttaaacaggctacggtggcagaaccctgaatgatgcgcactgcagctgccagcacgaagcaggtgatagcaatcggcaggcccatgccggttaacgcttcgcccagtgccggacctacgccagagtcaaccagcacctgtttgaacacgccgcccgcaccaatcaccagcagaatgatccccgccggttgcagcgcgtgaccgcaaatctccatcactttgtcttttggcatgccctgacgcattgccagaccgtaaatcgccaccagacaagcaaccagaatcgcggtaaacggatgaccgataaactcaaaccattcgtaagcagtacttccttccggcacaaaacgcgcggcaatggttttcagccctaccagcaccagcggcagcaggatcaggctcaggctgaatccgaaagatggcattttgccttcgccgagatgcggttcgctgatgtcgtcaggaatatgcagctcaacgtaacggctgatgaagttaccccacagcggcccggcaataatcattcccggaattgccgcacacaggccaatcaggatcatccagccaaagtcggcattcatctggcttgccagcagcatcggcgctggtccaggcaccagaaatgccgccgctgccgccacgcctgcaaataatgggattaccagcttcaccaggttcgtaccggtgtggcgcgccatactgaaagcaacgctaatcagcagaactatcgccacttcaaagaacagcggtagcgcacagaccagccccgcaaggccgatggcataatgcgcgcggctgtgaccgaaggatttgagcattttgacggcaatctgatcgactgcgccggtttcatgtaagatcttgccaaacatagctcccagggcgacaaccaccgccaggaagccgagggtgcctcccatccctttttccatcgtcgctgcgattttatcgagcggcataccagaaaaaaggccagcccccatggacaccaccattaaagccaggaaagcgtgcatacgcgccttcatgactaaaaacagcagcagtaaaacagaccctactgctgttaaaacaagcgttaatgtagtcactacttatttgccttttttaataacctcaatggtgcttgccacaacaccttccagcggttgatcgatatccaccaccagtacatcggtttcgtccgcacccggctcctgcagcgtttcaaactgcgtcaccaacatttgggttttaaagaaatggcctttgcgcgctttcaggcggatttcaatcacatcaaaatcgcctttcaaatagatgaaagagagattcggattaccttcacgcagcaagtcgcgatagtgttttttcaatgcagaacagacgatcaggctcactttattagtgcgctgcatagcaaacgcggcgtcgttcagcgcctgcaaccacggtttgcgatcgtcgtcattcagtggttcgccagacgccattttttcgatattgcgccgtggatggaggaaatcgccatcaagaaacgcggcatgaagttgatgcgccacttcactggcgaccgcagatttgccgctgccgcttacgcccatcaagacgtaaatgtggtgatcatggttagtcgtgctcaaagtggtgcccccacaatacaagaattaaaaatgttacgggtaactgttatcggtaacattgtccagccggacaatatcagaagcaatatccatccatgccttaagtgtataagtgtgagctacttcaaatttgtgggcttaaatagatccgcccggactcaaggtgaaacctaaatctaacattttcggtgtcacagattcgccacgaatacgcgccagcaggcgttcagcgccaatactgcccatccgctcacgcggcgtcagcacgctcgcaagtcgtggctccatcacctgaccaatgtcatgaccgtggaaaccggcaatcgccatatcgtcaggaacttttaaccccagacgctgacattcaaacgccgcgccgaccgccaggtcatcattcgtacagaacacgccatccagctgcggatattcccgccgcgcctggcgaatcagttcaataccggaagagtaagaagaagattgctcaaccatcacgctatatggcaccaggcctgcatccagcatcgcctgttcgtatcccttctgtttgatgatagtacgttcgtcgagacgtgcgccgagataggcaatgtggcgatgcccgcgagcaataatggcagtggtcatctggcgtgctgcttcaaagttatcaaaaccgacggcgatatcaaggcatgggctcttgctgtccatcagttccaccacgggaatacccgccacttcaatcatctttaaggtgcgcggcgtgtgggtacgttcggtgaggatcaggccgtcgatattccaggagagcatggattcgaggcgttcttgctccatttccggtttataaccgtagtgcgccagcatggtctgataaccgtgcgcgtcggtgacgctttcgattccgcgtaatacttccgcgaaaacctggttggtgagagaaggtaacaggacgccaatcgcccggctggtggcgttagagaggatatcgggcgcacgattgggaatatagcccagttcatcaagagccgcggcaatcttgccgcgtagagcgacggaaacctgctccgggttgcgtaaaaaacggctgaccgtcattttggtcacgcctacacggtcagccacatcctgaagtacgggtcttttctttttcatcgtcctgaaggtacaaaagagatagattctcttagtttaacacggacacatcagaaccttcccggggaaaacagtgcttgtttacaattattagatatacactaaatcaattgcatcgcattgtgctaacgacgcggcaaaaccccggaagcgtacatcagcacgcgaccggagcgagcgaggaagcctgcaaaaaggcaggcttcaaagatgccgttgagttttaaaccggcggcagatcgaacagtaacacttcgctgtcgctatccgcatggatggagattgcctgctcatcccagattgccagaccatcgctggtgctggctttcacgccgttaatggtgacattgcctttcaccacctggatccagacgcggcgttcagcggcaatctgatgcacgctctgctcatctttcagcaacgcccagcggtacagttccatatcctgatgcactttcaaactaccatctcgcgcatccgggctgagcaccagctgtttgccctgtacggcatcgaagcgacgctgttcataacgcggcgtaataccgttttcttcaggcatgatccagatctgatacagatgcagacgctcggtgctgcttgggttgtactcactgtgacgaatacccgtaccagcactcataatctggaactcacccgccggaacctgctctttattgcccatgctgtcctgatgctcaacagtaccttccagcacgtaggtcaaaatttccatatctttatgcgggtgagtgccgaagccctgccctgcttcaatcacgtcgtcgttaatcacgcgcagcgcggagaagcccataaagttcggatcgtaatagttggcaaaagagaaagtatgccaggagtccagccagccatgatttgcatgaccacgttcatttgctttgcgtaagtagatcatttgtattcgccccctgaatgatttcgatgggcttagtgtggacccgatctgcctgggatgatagagggtgaaaattgacccctctgttcaaaaaaattgaactattcgaggggccatcaaacttacttagcgagagttactgtggagggagaggcttgctcaaatccgcgttcaaggatttccagattggtaagaacttcagattccttgacgtaatttggcgcaccgtgggtgatggtttgatacaacgcatcataaacgcgcccgtaatcgcccatctccggcttcatctcttctctgaccgtcacgccctcgtcattgacatactccagcacaccgacgctatcatccgctgcgaatcccggttcgcccggcataatattagccttcaggctggtttcctgctggtcgataccgtatttaataaagctacctttcttaccgtgaacgataaatttcggataatcgattttcaccagatggctggttttgacgatggctttcaggtcgccataaaacagttgcgcttcaaaggtgtcgtcaggattggctttattacgcaggctgcggatgtcataagcgacgtgatccgggcgaccgaacagagaaataatctggtccatcgtatgcacaccaaggccataaaacgcgccatcctgcggcagcccaggtttggtttctgccaccgggcggtaatagtcaaaatggctttccacttcaacaatctctcccaacttgccactttcaatcgcttttttcgctgtcaggaagcaggagtcaaagcgacgattctgatacggcgtgacggtcagccctttgcttttcgccaacgcaaacagctctttcgcctgcgcaagtgtcggagtgaacggtttttcgaccagcacatttttcccggcttccagcgcgcgtttcgcgtactcgaaatggctgtccgcgtgggtgcagacaacaaccagcttaacatcgggatcgtttagtacttcgtcgagatcgctggtgaaatggatatgggaataaatgggagcctgttcttccggcttcgcatggcgacgaaaaatatgcgcgacatgccagctatccttgcggttaagtacatacggcagatggtaacgggtggtgcttttgccgaagccaataaaggcgcagttgatgaccatgatttcgtcctttttaaggtggttatttacaccttagcgcaaagcggacgtggttcctactggagtgcgcataacgaacacaagcactcccgtggataaattgagaacgaaagatcaaaaaaaaagccagcacccggctggctaagtaatactggaagcaatgtgagcaatgtcgtgctttcaggttctccgcgagggtcttcctgatcgcgagacaataataatcattctcattcgcacttgtccaacactttttgcaaaaaaatgcatttgactcgcatttgaaagtcaatgatgttgaaagggacatttaccccaaagaggacaaaggaacaaatgctcttcccacgaagagggccgctaaccttagtaccccgccgttaaatcatccacgctgcgcgggtcggatgcgccgtacaactcaccgtccggcccaaccataatgctttgtgtactgcccatcgcctctttcagcgccactttctgaccttttgcttccagcagcttgagcgtatccgggctaaaccctttttcgacacgcagctcgtccggcaaccactgatggtggaaacgcggcgcattggtcgcttcggcgacgttcaagccataatcgatgctattcaccaccatttgcagcactgtagtgatgatccggctaccgcctgggctaccggtaaccagccaggttttaccgtctttcaccacaatggtcgggctcatgctgctcagcgggcgtttgttcggcccgacggcgttggcatcaccgcccaccagcccgtaaacgttcggtacgcccggtttggcggagaaatcatccatctggttattaagcagaataccgctctcgcccgcgacaatgcccgtaccgaaggtggtgttcagcgtataggtcaccgccaccgcgttaccatctttatccaccacactgtaatgggtagtttgattactctcataaggcgcaagcttgccggggcgaatttcgctggatggcttcgctttattgatatcaatttgatcggcaatagatttggcataggctttattggtcagcgcctgccacggtactttgacaaaatccgggtcgccaagatattcgctgcggtcggcgtaggcgtatttctccgcttctgccatgatttgcatcgcatcggcgctgccaaagccgtatttcttcatatcgaagttttccagaatattgaggatttgtacgatatggatcccgccggaggatggcggtggcatggagtaaacctgatacccgcgataatcgccgcttatcggagtgcgttcgaccgctttataggctgctaaatcttctttagtgatcaagccaccgtttttctgcatctcctgggcgatctgttccgcaatcgtgcctttatagaattcgtccgggccgttttcagcaatcatctccaggctctttgccaggttcgcctgcaccagcgtgtcgccctttttcagcggctcgccctctttccagaagatagctttactgttttcgtgattcggcaacacttcgctaccgtaggttttgagatcgtcagccagcgcgtcgttaacgataaaaccatcgcgtgccagtttaaacgcgggctgcacgactttgttcagcggcatggtgccgtatttatccagcgccaggctgaaacctgctaccgtacccggtgtgccggaagccagatggctagtgagactttttttgctgtccgggttgccctgatcatcgaggaacatatcgcgggtcgctttggcgggtgccatttcgcggaaatcgatagccgtggtattgccatttttgctgcggattaacataaaaccaccaccgcccagattccctgcctgcggatgcgttaccgccagcgcgtagcccaccgccacggcggcatcaacggcattcccgccctccttgagaatatccacccccacctgagtggcagtggcgtccacagacgctaccattccctgtttcgcgcgtaccgggtggaagacatcttcctccacaccatagctgacgggcggcgcaggaggcgcggcggcggcgctaaaacaacttccactgagcagagcagcaatggccacccggcgtaaaaacgtcggttttatcatcgttattctccagagattaaggggcaaccccagctaagcctggtatataactctgaattaatcatcgttttgtcgggaagcgagtaaacttaaaggatatcttcagaggaggatacgcgatgaaacgacttctgattcttacggcactcctgccgtttgtcggctttgcacagcccattaatactctgaacaaccctaaccagccggggtatcagatacccagccagcagcggatgcaaacccagatgcagactcagcaaatccagcaaaaagggatgctgaatcagcaactgaaaacgcaaactcagttgcaacagcagcatttagaaaaccagataaacaataattctcagcgggtgttgcagagtcagccgggggagcgaaatcccgcccggcagcaaatgctgcccaacaccaacggcgggatgttaaacagcaaccgtaatccggatagtagcttgaatcagcagcatatgctgccggagaggagaaacggcgacatgctgaatcagcccagcacgccgcagcctgacattccgttgaaaactattgggccgtaattattgggccgtaaagttcggaccaatcacgtcaatcgcatcggtacagatgcaatccacaccccagcgcagcaactctgctgcgcgctggggtttattgacggtataaaccagaatccgcagtccggcgtctttcaactgcatcactcgcgctttattgagtaacttatgattgagatgaatagagacgcagcccagccgcgcggtcagttcgcgccagtcgtcgcgccactcatccagcaacaaaccgcgcggcagttccggtgccgcctgttgtgcagcttctaaagcatcaatctcaaagctactcagcagcggcggcgtcataccggcccacagctcgcgtgccgccagcgccaccattttgcccgttaatggcccggtgccggtggtgggtttgatttcgatattcgccatcatcccgtgttcgcggcaacgttccgccacctggctaagcaacggtagcggctcacctttaaacattttgctgtaccaactgcccgcatccacgcgcagtaaatcctgccagttcagttcacccgcgacgccccagccgttgctggtacgttcgagattgtcgtcatggagcaggaagatctcgccatctttgcttaacttcgcgtcaaattcgatcatcttatgaccgtattttgccccgacgtcgatactcgccagggtgttttccggggccagcttaccgccgccacgatgagcgacgatgcggggataaggccagttactcatactcgttgtcctgtttcaccatcaaaaagatgcagctgattttccgccagatgcagccacagcgtgctgcctgccgtcgggcgctcctgatgcgccagtcgcaccaccagcttctgctcgccccagcgtccgtgcgccaggttatctgcgccgaggatctccagcgtgtccatcaccatcggtacgccgccttctgcctggctgcttagcgcaatatgttccgggcgaatgccgagagtcattttacgcccggcatactgacggtagccaccgtttagcggcagctcaataccgccgtccagttcgaaatgcgtgccttcgttattcacgcggcctgtcagcaggttcatcgccggactgccgataaaactcgctacaaacaggctggcgggcttttcgtagacttcaactggtgtgccaatctgttcggcaacaccgccgttcatcaccattactcgctgggcgagcgtcatcgcttcaacctgatcgtgagtaacgtagagactagtcgttttcaggcgacggtgcaactgttgcagttcaagacgcatctgcacgcgcagcttggcatcgaggttagagagcggctcatcaaacaggaacaccgccggatcgcgcacaatcgcgcggcccatcgccacacgctggcgctgaccgccggaaagctcgcgcgggcgacgtttgagcagaccgtccagctccagaatgcgcgccgcttctttaacgcgctcggcaatttgctgcttgcccatgccgcgaattttcagcccccacgccatgttttcttcgacactcatatgcggataaagcgcgtagttctggaacaccatcgcaatcccgcgatcttttggctccatttcagtcacgcgctggtcgttgatccagatatcgccttctgtcacccgctccagcccggcaaccatgcgcagcagcgtgcttttcccgcagccagacggcccgaccatcacgataaattcgccatccgccacatcaagggtcagcggtttaatgacctgggttttaccatcccagcttttggttactgcctgtaatttcagtcctgccatcttatttctcactatcgaccaggccgcgcacgaaggcacgctgcatcactaaaacaatcaccaccggagggataagcgttaacaacatcgccaccatcacactgttccattccgtggtgccttcgcctgtagcgatcatccctttgatccctgccacggtggtgccgagatccacatcggtaataatcaacaacggccacaaatactgattccagccgtagataaaggtgatcacaaacagcgccgccagattagttttggagagcggaaaaacgatgtcgcaaaagaagcgcattgggcttgcgccgtcgatccgcgcggcttccaccagctcatccggcagcgtcataaagaactggcggaacaggaaagtagcggtcgcgctggccatcagcggcagcgttaaaccggcgtagctgtcgagcatctgcaggttggcgatgacttccaccgtcgggaagatacgtacttcaaccggcagcatcagggtgataaaaatcatccagaagaagaggttacgtagcggaaaacgaaaccagacaatggcaaatgcgctgagcatgctgacggtaattttgccgagcgtaatgctgaacgccatcacaaagctgttaagcaacatccgccagaacggcgcgctattcgtgcctaccccgttcacccagatgttgtggatgttttccagcagatgtgtgccggggatgagcgtcatcggcgcggcatagacggcctgtttatccagcgtcgccgcgacaaacgccacgtacagcgggaagaggatcaccgcgatcccgaggatcagcatggtatggctgaatatcgtcagccacggacggttctcaatcattggtaacgcaccttgctttcaacatagcggaactgcaccaccgtcagcacgatgacgaggaacatcaacaccacgctctgtgcggcagagctagccagatccagtccggtaaaaccttcgcggtagatcttataaatcagcgtcgtggtggcctgaaccggcccgccggacgtggcggcgtcgatcaccgggaaggtgtcgaagaaggcatacaccaggttcactaccagcaggaagaaactcaccggggcgataagcggcagcgcaatcttaaagaagcggcgaatcggccctgcaccgtcgatggctgcggcttcgatcaagctacggggaatggattgcagcgcggcatagaagaacaggaagttgtagctgatttgcttccatacactggcaaacaccaccagaaacattgcctgaccgctgttttgcgcgtggttccagtcgtagccgaactccgcgagaaaatgggtgatcagcccgcgaccggggttaaacaggaagatccacaatacggcggcaacggcgggagccacggcgtaaggcagcaacattaaggtttgatagaaacggctgccgcgcacgatgtactccaccagcgccgcaaagaacaggcttaccagcaaaccgctgacggtgacaaaggtgctgaattttatcgtcgtccagaaggagtcgagatagtagctgtcatggaacagcgtgacgaagttatccaggccgacaaactggctggagaaaccaaacggatcgacgctttgtaggctgtaccacaacgcttcgcccgcaggccagataaaaaagataacggtgatgatgagctgcggcgcgaccagcagataaggcagccagcggctgcggaacaccggacgggaactactcattacggttaattcctgaactgtgccggatgcgcttcgcttatccggcctacacgcgatgccaggtcagataagcgaaacgcatccgacattacactgattaagacttcgtgcttttctcaaagcggcgcagcaactgatttccacgctcaacggcggtatccagtgcctgctgtggtgtcttcttaccggtccacacgctctccagctcttcatccacaatcacgcggatctgcggcatgttgcccagacgcagccctttggtgaacggcaacggcggcttattcagcatctgacgcgtcgcggtatccgcccctgggtttttctcataaaagccctgctcacgggtcaggtcatacgctgctttggtgattggcagataaccggttttctgatgccactcggcagcgttttctggcttcgcgaggaaatcgaggaacttcgccacaccggtatacgtttctttatctttaccctgcatcacccacaggctggctccgccgataatggcgttttgtggcgcatctttcgcatcggcgtcgtaaggcatcatgcctacgccgtagttaaatttggcgtactcgcgaatgttggcaagagaaccggaagaggcggtggtcatcgcgcaatcaccgttatagaacttctcggtggattcatccttacgaccgacgtagctgaagtcgcccttcttgttcatctcctcgagcatggcgatgtgtttcacctgctccggcttattgaactccagcaccgcgtccgtgccgtcaaagccgttgtttttgctggcaaacggcagaccgttccaggcgctaaagttttccagttggatccagccctgccagccgctggcgtagccgcacttcatgccggaggctttcagtttcgcggcatagtccgccagatcctgccaggttttcggcggctgttccgggtctaatcctgctttcttgaaggcgtctttgttgtaatagagaacgggggtgctgctgttgaatggctgggagagtaagtggcccgttttgctgtcggagtagtaaccactaaccgtcggcacaaactggctctcatcgaactgaatccctgcctctttaaacacgtcatacaccggtttaatggctttgctcgccatcatggtggcggtgccaacttcataaacctgcaaaatagccggcgcgttgccggtacgaaatgcggcaatccccgcgcttaaattctgttcgtagttgcctttataggtcggtacaattttgtaatccgggttttcggcgttaaaacgttgggccagagaatccacctctttacccagttccccttccatagaatgccagaacggaatggtcgtcactgcctgtgcattccccattaacgccagtccgagcgccagtgcactagctgtataatgtaacggtttcatcgtttatctctcttgttgtaccgaatgcgcgaattcacgcgttttatgctcgcggggtaacatgacatgctcgaattacagaaaaataacttttttgttacatttgtaagatagtaaggtgtcagaaagatgacaaggcggtgacggcgtgggtgagggaaaatgggagatggggcacggataagcgggaaaatatagaaggtctgaatcaaactctacagattgctcatcgtttcatgccggatgcggcgtaaacgccttatcaggcctacaagatcgtgcaaattcaacatattgccactcacccagtaggcctgataagcgcagcgcatcaggcaattttacatttgtcacctgtctcaaaggagtcttttgactccctatcaatcaacgtgttattacccgcctaaatacgcacttctcaccgcttcattcgccagcagcgcatcaccagtatcggaaagcactacatggccgttttccagcacgtagccgcgatccgccagctttagcgcctggttggcgttctgctcgacgagaaagatagtcatcccctgctcgcgcagctgctcgatggtgtcgaaaatttgctggatgataatcggcgcaagaccgaggcttggctcatcaagcagtagcaaacgcgggttgctcatcagcgcacgaccaatcgccagcatctgctgttcaccgccggacatggtgcccgcccgctgaatacggcgctcatgcagacgtggaaacagctcatacacccactttatgcgctcctggaactggtcgcgttcagcaaaaaaaccgcccatcgccaggttctcttccaccgtcatccggctgaagacgcgacgcccttccgggacaatcgccaccgcttcgcgcatgattttcgctgtctgccagtcggtaatgtctttatcatcaaacacaattcgcccgctggtggcacgcggatcgccgcataacgtgccgagcaaggtggttttccccgccccgttcgcgccaatcagcgtgacaatctcgccctgattgatatgcaggctcacctcatgcagcgcctggattttgccgtagtgggcgctgactttgtcaaaggacaacatgactttttccatcttatgcctcacctaaataggcacggatcacgtccgggttattacggatctgctccggcgtaccgtttgccagcggcgtcccctgattgaccacgtaaattcggtcgctaattcccatcaccagcttcatatcgtgttcaatcaacaagatagtggtgttgtgatgattgcgcagttcggcaatcagctcatccagctctttcgtctctttcgggttaagacctgccgcaggttcgtcgagcattaaaatctccggctgcgtcaccatgcagcgggcaatctcaagacggcgctggtcaccataggccaggttactcgcctgacggttggcgtgttccagcaaaccaatgcgctcaagccaggtcgcggcgcggtcgagcgcttcgctctgggcgcgacggaaggatggcgttttcaacaggccagagaacagcccggttttcagttgctgatgctgcgccaccagcaggttttcaattaccgtcatttcacggaacagacgcacatgctggaaggtgcgcaccacgcccatgcgggcaatttgctgccccggtaaaccttccaggtgctgatcgcgcagtaaaatggtgccgccggtgggtttgtagaatccggtcagacagttaaaaaccgtggtttttccggcaccgttagggccgattaagctgacgatctcctgcgggtacagttcaagattgacgttgttcaccgccagcaggccgccgaagcgcatcatcaggccgttaacagataataatggctgactcatgcctgctctcctttcgctgcgccgtttttcagcttcagttgcgggcgcgtcatgggcagcaagccctgcggacgccagatcatcatcagcaccatcaaaccaccgagcattaacatgctgtattcgttgaaatcacgcatcaactcgcggctcaccaccagcaaaattgccgccagaatcaccgcaaattggctgcccataccgccgagcaccactatcgccagcacaaacgcgctttcggcaaaggtgaaggattccgggctgacaaagccctgacgcgccgcaaacagcgttccggcaaaaccggcaaacgcggcacttatggtaaaggcagtcagcttgatacgacgcgggcttaagcccaggctacggcaggcgatttcatcttcacgcaacgcttcccacgcacgccccagcggcatccgcagcaggcggttaatgacaaacaggcttagcaccaccagcagcaacgccaccaggtagaggaagatgacacgatcggagggatcgtatttcaggccaaagaaattactgaacgtgtcccagccgccttcacgagcggtacggctgaactcgagtccgaagagtgtcggtttcgggatctgactgattccgttcgggccgccggtaatttcggtgttattgagcagcaatatgcgcacaatttcgccgaaaccgagggtaacgatcgccagatagtcaccgcgcaaacgcagcaccggaaaaccgagcaggaagcccgccgccgctgccattaatccagcaatcggcaggcaggtccagaagcccaagccgtaatagtgattgagcagcgcaaaagtgtaagcgccgatggcgtaaaaaccgccgtaccccagcaccagcagaccagaaagaccaacaaccacgttcagcccgagaccgaggataatgtagatcatggtcagggtggcaatatccaccgtcccgcgactaaccataaacggccacgccaccgcaagcaccaacagcgccacgaggaacagtttctgcttcaccgtggagccatcaatggcgggcagaataaacttcggtccggaaacgcttttcaaccctttctggaaagccggtcgcaaaagctggaagaaaaagaccaccgccgtgccgataaacacccactgccaacggacatcgctagccgtgtcgaccaccagtttggtgccatccagctccagttgcacgcccataaagacgcccgccagcacaaagaacatcgcggcagagagcagcgccattgcaatatgcatcggtttcatactttctctacctccgggcgacccagaataccggtcggcatcaccagcagcaccagaatcagcagggcgaaactgaccacatctttatattccgtactcagataggcagaagagagcgcctccgcaatccccagaatcaggccgccaatcatcgctcccggaatgctgccaatcccaccgagcaccgccgcggtaaaggctttcatcccggccataaagccgatgtaggggttaatgacgccgtagaactgaccgagcagcacacccgccaccgccgccatcgccgcgccaatcacaaaggtcagcgcaatcacccggtcggtgttaatgccaagcagactcgccattttcagatcttccgcgcaggcacgacacgcgcgacccatgcgggaatagcgaatgaaaatcgtcagcgccagcatggcgaggaaggtaacaatccagatcaccgcctgcatggtggtaatagaggcagagaagttttcgctatgccccaccacccactgaccgttaaacaggctcggcagcgccacgtcgcggctaccttcggtcaggctgacgtagttttgcaggaagatggacataccgattgcagagatgagtgcaatcaggcgcttagagttacgcaccgggcggtaagccacccgttcgatactccagccgtaggcgctggcaatgacgattgcgccgacgaatcccgcagctaccagcagccagccggtatcaatgcccatcatcatcagcgcggcgatgatcataaaactgacgtagctgccaatcatataaacctcgccgtgggcgaagttgatcatgccgataatgccgtaaaccatggtgtagccgatggctatcagcgcgtaggtactgcccagcgtgacgccgttaaacatctgctgcaagaaatacaaaaactgctcagacataaggtaacctttctaaacccgcccgcattttacgggcggtgggatgatcacttggctgccgtggaactaccgtcggcgtgccactggaagacaccaaaatcaaatcccttaagatcgcctttttcatcccagttcagcggcccaatcacggtgtttgcaccgttagcttttaaatctttcaccagcgccagcggctcatcgctgccggtacgctcaagggcagtcgccagagattgcaccgccgcgtaggtgatccagacataaggcccggacggatctttcttgtctgctttcagcgcatcaacgatgccctggtttgccggatcctggtcatagcgttttggcatagtgaccaacatgccttcggcggcatcaccggcaatgttgctcaagctcgcattacccacaccttccggccccataaactgggttttcaggccaacggaacgggcctggcgcagcatctgccccatttccgggtagtaaccgccgtagtaaacgaagtcgatgttttcttttttcaggcgggcgatcagcgcggagaaatctttctccccggcggtaataccgtcgaagaagacgacgttggcgttagccgctttcagcccgtcctgcacgctacgcgccagcccttcgccatactgttgtttgtcgtgaatgatggcgatgcgctggggcttcaccgtctcaagaatgtattttgccgccgttggcccctgggaagagtccagcccggcagtacgcataatgtgttgataaccgcgttgggtcagctccgggttggtcgctcccgggctgatcatcagaataccttcgtcttcatagatatcactcgcaggctgggtagaagaagaacacagatgaccaataacgtatttaatgccgtcattaacgattttgttggcgaccgcaacggcttgtttcgggtcgcatgcgtcgtcatattccacgccaaccagtttatcgcccttaattccccctttggcattaatgtctttaattgcctgacgcgcgccgttaaattccatatcgccccactgggcaatcgggccggacatcgcgccgacaacggcgactttaatatcgtcagccatagcggtgtgactaattgccagtgcaatcatccctgcgatgatagttttcgcattccgtttcatagtcaaaaatccccattcgtgatgttgtgttgctttgtttttatgtgttaacaaatcagactgttctttttttatactgcactgtttttgcctgtctgattaaggggttagcgcagtattttgtgataatagcgattaaaatccctatttttcagtcgattaagaacagataatattctgaatttattgatagataaacagaaaaaagtgcctttgtcagcataaaataacggcacaaagggcggaataattcactatcattcaggggattatgctggacatttttcattctctaatgttttaattttgtaattattgctgttaaaaaattaatcacctgccaaaagaaataaaaaagagaaagcctccgattaaattatttcgctacactggttccacttttgtgatttacacgggttacccatgaagctgaccatcattcgattagaaaaatttagcgaccaagaccggattgacctgcaaaagatctggccggagtattccccttccagcttacaggttgacgataaccaccgtatctacgccgcgcgttttaacgagcgcctgctcgctgccgtgcgggtaaccttaagcggcaccgagggagcactggattccctgcgcgtgcgggaagtcacccgccgtcgcggtgtggggcaatatctgctggaagaggttttgcgtaacaatcctggcgttagttgctggtggatggcggatgcaggcgtggaagatcgcggtgtgatgacggcgtttatgcaggcgctggggtttacggcacaacagggcggctgggagaagtgttaatcgtcaagtttgatttcaaaagtgatattgcctgatgcgctacgcttatcaggcctacaatgtgtgttgcaatttactgatttctttggatcttgtaggccggataaggcgtttacgccgcatccggcatgaagcaacgtactcgatattagcaatttggcggcaacccaaagttgccgattaatgattacttcgcatcggtcgccgtgccgttggcgtgccagtcaaatacgccgaactcaaagcctttcagatcgcctttctcatcccaggtcagcggtcccattacggtatccacggagttcgctttcaggtatttggcgatttcagccggatcgtcagactgattcaggcccgcctgcaaagattgcagcgcggcgtaggtggtccaaacgaatgcgccacttgggtcctgttttttcgctttgatcgcgtcaacaatgggtttgttcgccggaacctgatcgtagttcttcggcttggtcaccagcagcccttccgcactttcgcccgcaatgttagacaggctaacgttagccacaccttccggccccataaactgagttttcagccctgccgcgcgtgcctgacgcaggatttgccccatttccgggtgataaccgccgtagtaaacgaagtcgatattctcttttttcagacgcgccaccagcgtactgaaatctttttccccggcggtgatgccatcaaagaacaccacgtttgcattgcctttcttcaggccgtcctgcaccgctcgcgccagaccttcgccgtattgctgtttgtcgtgaacgatagcaatacgctgcggtttcactttctcaagaatatatttcgccgccgtcggcccctggtcggagtccaggccggtggtgcgcaggatcagctgatagccacgggcggtcagctccggcgcggttgccgctggggtgatcattaaaatgccttcgtcttcgtagatgtcagacgcaggctgcgtactactagaacagaggtgaccaatcacatatttaatgccgtcgttaacgactttgttcgccaccgcaaccgcctgtttcgggtcacaggcatcgtcatattttacgatttgcagtttgttgcctttaatgccgcctttagcgttgatatccgcaaccgcctgctctgcgccggtaaactcctggtcaccgtactgcgcaaccggaccggacattgcgcccacgaccgcgactttaatatcttctgccagagccatattgctgaatgccagcgcgatacatcctgccagtaacgctttaccctttatgttcatcctgagaatccccattcttctggttattacgtgtgttgtgatgttgtttttcagcactttatttcgttttatgcatgactacccgtgctttagcagcatactctgctaaaacatacccgatttttatgatattggaatagctattttgacagtttattaacaatctgcgtggggattggcgttttgccggaggggaaattgattattacagaggcccaaaaaacaaaaaccccggactctcatccagggttctctgcttaatagcggaaattacgcttcaatggcagcacgcaattttttcatcgcgttcttttccagctggcgtacacgctcagcggaaacgccgtaacggtcagccagttcctgcaacgtggacttgttgtcttcgtccagccagcgcgcacggatgatgtcctggctgcgttcgtccagaccctgcatcgcgtcggtcagacggtttgccgcctgctcttcccagttatcatcttcaatgccgtcggcaaagttagaacttttatcctgcagatagagcaccggagccatcggctggctgtcggaatcgtcgtcggaagacaggtcaaaggtcatgtcctgtgccgccatacgactttccatctcacgtacgtctttgctggttacgcccagttcacgggccaccatttcgacttcatcctggttaaaccagcccagacgctgcttggttttacgcaggttgaagaacagtttgcgctgcgctttggtggtcgcaactttgacgatacgccagttacgcagaacgtattcgtggatctctgctttgatccagtgaacggcgaaggagaccaggcgcacacccacttccgggttgaaacggcgcactgctttcatcaggccgatgttaccttcctgaatcaaatccgcctgtggcaggccatagcccgcataattacgagcaatatgaacaacaaaccgcaggtgagacaggatcagcgttttagctgcttccagatcgccatggtaatgcagcttttcagccagcgcccgctcctcgtcagcgctcaacatcggccacgcgttagctgcccggatgtaggaatccaggttgccaactggggctaaagctaaactttgcattttgtcagtcattcaaatcctctcaatcgatatcttctggcgcttcagtggtagcaacaactgtgccagagcttaagagcaacgaggttatcattcactgttttatcagaccgtgattttatccacaagttcaatgcaagcttgtgaataaattacgcacaaaatgtgacatagagatgaaataccgggaagagacaacggggtctctttccctgctacggaacccattgcagggaaagagtataacacgcttttattattcaggcgtaaagtggcgtaaatgttgtaccgtggcaagccacgctgccacccagccaatcatgctgcataccagcagcaatagcaggcattcatcgaaacttaagccattgatatcaaacttcgttccgaaaacctgtgccacttccgcaaccgcgctactcaatcgcagcaccagaatttcactcaaaattaaactcaacaatgcgccagaaaatcccagcagtgcgccaccatacaggaacgggcgcaggatgaatccatctgtcgcaccaatcagtttctgtacgttaatggagtcacggcgagcaaagatactcagacgcacactgttaccgatgacgaggaacacggccgccaccatcaacacgccgatcatcgcgctaacgcgcccgaccagcccggtcaacgccgccagacgggcaaaccagctgtcatccatccgcacttcgtcaatgccgttaatctgcgtgatacgatcacgcagcgtattcagactttccgtcccctggaaatcgagtttcgggatcaccaccgccactgccggaagcgggttttcttccagcatatccagcgcaccaccaaaaccagaccagttacggaactcacccagtgcgtcttcacgagaaagatagttcactttctccacgccttgctcggcctgcaactgtgccaccacgcccgcagcagcgtcatcgtccagcgttttttgcagataaacagtgatttgcggactcggataatactgcgtcgccgcctggttaacgtttttgtacaccatataacagacgctgggcagcgtcagagaaatggcgataaccatcaccgttaaaaacgtggcgaacggtttgcttttcagatcctgcaatgcgccgtggaaggcatagcgcacctgttcgttgaaaacgttggttttgcgatttaccggttttgggctggatttcgcgcgttttggtgcgttacgaccgccgtcgccactgccgccgacgcttttacggaagcgatcaagacgcccgccaaactgccgaatatgattgattgcatcgcgcttattcatggcccacgcctccatgcaagtgaccatcgctcagggtgagcatgcgataggaacgccggctgatcaggttgatgtcgtgcgttgccatcaatacggttaccccaacgcggttaaactcttcaaacagacgtaaaatgccttcgctcagcgcgtcgtccaggttaccagtcggttcgtccgccagcagtaccgcgggcttgttcaccaccgcgcgggcaatgccaacacgctgttgttcaccgccgctaagctgaatagggaagttcttcgctttgtccagtagcccgactttatccagcgccgcgctcacccggcgacgaatatcgtcaccgctggcaccggcgataatcagcgggatcgccacgttatcgtagacagtacggtccatcagtagatggtgatcctggaaaatcatgccaatctggcggcgcagaaacggaacttcacggtttttcagacgcgtgatgtcatggccgctaaaccagattttcccggcgctgggccgctcaatcccacagatcagcttcaggagggtacttttccctgcgccggaatgaccggtcagaaacgccatctcacccggctgcatatggaacgtaacgccctgcagcgcctgtctcccaccgagataagccttgctgacatgttcaaagcgaatcattgttaatcctctcgggcaaaaagtgcctctataaagtcgtccgccttaaacggacgcaaatcctcaatacgttcgccgacaccaatgtagcggatagggataccaaactggtcagccacgctgaaaattaccccgcctttcgccgtgccgtccagtttcgttagcgtgatgccggttaagccaacggcttcatggaacagtttggcctggcttaccgcgttctgcccggtgctggcatcaatagtcagcataacttcatgcggcgcttcaacgtcgagtttcttcatcacgcggacgattttcttcaactcttccatcaggtggcttttgttctgcaggcgtccggctgtatcggcaatcaggacgtcgatattacgcgctttagctgcctgaatggcgtcgaagataacagaggcggaatccgccccggtatgctgggcaatcaccggaatattgttgcgctgaccccagacctgaagctgttcaaccgcagctgcacggaaagtatcacccgccgccagcatcacgcttttaccctgctgctcaaactgacgcgccagcttaccaatcgtcgtggttttacccacaccgttgacgcccaccatcaggatcacaaacggcgctttgccttcaacattcagcggctcatcgactttcgccagaatctcgcccatctcttctttcagcaggccatagagcgcctcggcgtcacgaagctgcttgcgggatgcgccttccgtcagattggtgataattttacgtgtggtttccacacccacatcggcgatcaaaagctgctcttccagctcctcaaacagatcatcgtcgatttttttaccgcggaacaggctgataaatccggaaccgagattttctttggtttttaacaggctgcgtttcaggcgcgcgaaaaaaccttctttggtcggtttttcctgctcctgagcgatttcttccaccggctgctcttcttctgccggaggaaccaccatcaccgcctcttctgccgcttcggcagccagcgccgtttccagctcttcgtcggtaatttcttctttagccgcttcttcttccgccgcttcgacaatctctacggtttccgcttcagcctgccactcttctgggctaaccgcttcggcgttgacgtcttccggcaacggcagctcttcacgttcgatagccactggctccggcgtttcttctacgaccggttccggctgtgcaacgacttccgcttcaggctgcgctttttcactttcagcaacctgttcagtgacttccacaacgtcggcagcaaaagtttccgcctcggcttcagtatgcgcttgcggctgctcttcaacggcttgttcagaggccttcacaggctcttgcgcctgaacgatttcttctacaaccggttgttcattctgaacttctgtctctttttccggggtctgctctttttgaccaaagcccagccaggaaaaaaagccacgttttttttctttcgccatttgcgactacactcctcgctgttgcttcatggcacagcgttaacgctatgtacatagcagctaaaaaaatgatgaaatagtctatcacttaacttaattcacatcaccgcctgcaagtatgtgttatctggcggattgagcaatttatcatgaaaaaaccgaatcattccggcagcggccaaatccgcattattggcgggcagtggcgaggccgtaaactcccggttcctgatagcccaggtctgcgccccaccaccgaccgcgtacgcgaaacgttgtttaactggctggctccggtcattgttgacgcccaatgtctggattgcttcgccgggagcggcgcgctggggctggaagcgttaagccgctacgctgcgggggcaacgttgattgagatggatcgcgcggtttctcagcagttaattaagaatctggcgacactaaaagcaggcaatgcacgcgtggtgaacagcaacgcgatgagtttcctggcgcaaaaaggtacaccgcataatatcgtgtttgtcgatccaccgttccgccgtggcttgttagaagagacgataaatttactggaagataacggctggctggctgacgaagccctgatttatgtcgaaagcgaagtcgaaaacggtctgcccactgttccagcaaactggagtttacatcgggaaaaagtggcgggtcaggtggcttatcggctgtatcaacgcgaagcacaaggagaaagtgatgctgattaatattggtcgtttgttaatgctctgcgtttggggatttttaatcctcaacctggtgcatcccttcccacgcccgctgaatatcttcgttaacgtggcgctgatttttaccgtgctgatgcatggtatgcagctggcgctattgaaatccactttaccgaaagatggcccgcagatgaccaccgccgaaaaggtacggattttccttttcggcgtgtttgaactgctggcctggcagaagaaatttaaagttaaaaaataaccttattgttcgcctacaaagctgacaaagcgcgttcctttatagctcagcgtacctttatcgcccactgtcagggcgtggtactgctgggcgtcgaggcgaaacgtctgctccattcctccgctttgcggtttgaagcttgcctcatagcgtatactggtgcctgccggagtcacttcctgctggcggctacggcgatcgttaatcggtttttcccgcttgttgctcaccaccaccagcttttgctggagcggagccatatcattatcagctttttcccgtcgctgttgcataaaacgaaagcttgcggcgacgacaattaagccaatgataacaataaagaaaagaggtggtttgctcatctttatccctcatcggaaaatgcggaaataagcataccctgccagttatggtgttgtcatccgtccaccctcgccactaaactggaagcaagaccgtaggcattccgcttacgaaaaaataacgaattcaaggaactaagatgctttggagctttatcgctgtctgtctttccgcatggctatctgtggatgcaagctatcgtgggccaacctggcaacgctgggtgtttaaaccgttaacccttcttctcctgctgttactggcctggcaagcgccgatgttcgacgccattagctatctggtgctggcagggctgtgcgccagtctgctgggcgatgcgctaaccctgttgccacgtcaacgtctgatgtacgccatcggcgcgtttttcctcagccacctgctgtacaccatctatttcgccagtcagatgacgctctctttcttctggcctctaccactggtgctgctggttctgggtgcgctgttactggcgattatctggacgcgcctggaagagtaccgttggcctatctgcacgtttatcggcatgacgctggtgatggtgtggctggcaggtgaactgtggttcttccgtccgaccgctccggcgctctctgcgtttgttggcgctagcttgctgtttatcagtaactttgtctggctggggagccactatcgccgacgcttccgtgcggataacgcgattgctgcggcctgctactttgccggtcacttcctgatcgtccgcagcctgtatctctgataaaacttgactctggagtcgactccagagtgtatccttcggttaatgagaaaaaacttaaccggaggatgccatgagcactcctgacaatcacggcaagaaagcccctcaatttgctgcgttcaaaccgctaaccacggtacagaacgccaacgactgttgctgcgacggcgcatgttccagcacgccaactctctctgaaaacgtctccggcacccgctatagctggaaagtcagcggcatggactgcgccgcctgtgcgcgcaaggtagaaaatgccgtgcgccagcttgcaggcgtgaatcaggtgcaggtgttgttcgccaccgaaaaactggtggtcgatgccgacaatgacattcgtgcacaagttgaatctgcgctgcaaaaagcaggctattccctgcgcgatgaacaggccgccgaagaaccgcaagcaagtcgcctgaaagagaatctgccgctgattacgctaatcgtgatgatggcaatcagctggggtctggagcagttcaatcatccgttcgggcaactggcgtttatcgcgaccacgctggttgggctgtacccgattgctcgtcaggcattacggttgatcaaatccggcagctacttcgccattgaaaccttaatgagcgtagccgctattggtgcactgtttattggcgcaacggctgaagctgcgatggtgttgctgctgtttttgattggtgaacgactggaaggctgggccgccagccgcgcgcgtcagggcgttagcgcgttaatggcgctgaaaccagaaaccgccacgcgcctgcgtaagggtgagcgggaagaggtggcgattaacagcctgcgccctggcgatgtgattgaagtcgccgcaggtgggcgtttgcctgccgacggtaaactgctcagtccgtttgccagttttgatgaaagcgccctgaccggcgaatccattccggtggagcgcgcaacgggcgataaagtccctgctggtgccaccagcgtagaccgtctggtgacgttggaagtgctgagtgaaccgggagccagcgccattgaccggattctgaaactgatcgaagaagccgaagagcgtcgcgctcccattgagcggtttatcgaccgtttcagccgtatctatacgcccgcgattatggccgtcgctctgctggtgacgctggtgccaccgctgctgtttgccgccagctggcaggagtggatttataaagggctgacgctgctgctgattggctgcccgtgtgcgttagttatcagtacgcctgcggcgattacctccgggctggcggcggcagcgcgtcgtggggcgttgattaaaggcggagcggcgctggaacagctgggtcgtgttactcaggtggcgtttgataaaaccggtacgctgaccgtcggtaaaccgcgcgttaccgcgattcatccggcaacgggtattagtgaatctgaactgctgacactggcggcggcggtcgagcaaggcgcgacgcatccactggcgcaagccatcgtacgcgaagcacaggttgctgaactcgccattcccaccgccgaaagtcagcgggcgctggtcgggtctggcattgaagcgcaggttaacggtgagcgcgtattgatttgcgctgccgggaaacatcccgctgatgcatttactggtttaattaacgaactggaaagcgccgggcaaacggtagtgctggtagtacgtaacgatgacgtgcttggtgtcattgcgttacaggataccctgcgcgccgatgctgcaactgccatcagtgaactgaacgcgctgggcgtcaaaggggtgatcctcaccggcgataatccacgcgcagcggcggcaattgccggggagctggggctggagtttaaagcgggcctgttgccggaagataaagtcaaagcggtgaccgagctgaatcaacatgcgccgctggcgatggtcggtgacggtattaacgacgcgccagcgatgaaagctgccgccatcgggattgcaatgggtagcggcacagacgtggcgctggaaaccgccgacgcagcattaacccataaccacctgcgcggcctggtgcaaatgattgaactggcacgcgccactcacgccaatatccgccagaacatcactattgcgctggggctgaaagggatcttcctcgtcaccacgctgttagggatgaccgggttgtggctggcagtgctggcagatacgggggcgacggtgctggtgacagcgaatgcgttaagattgttgcgcaggagataaggcaaaccgatcgcaacattgagcgcgatcggtcccctcgcccctctggggagagggttagggtgaggggaaaaggcggcatcgaagccaatcagcccctatcaaccgcctttacgaatcaaataacgataaggcagtccatccgtctctttagcaaccagttcgtgttccataaaggtacaaaacccaggaatatcgcgggtagtggccggatcgtcggcgataatcagcaacgtttcgccaggctgcatattgcgcacggttttgcgcaccatcatcaccggttccgggcagcgcaggccaagcgcgtcgagtgtgtggtcagggctggaaaagagatcggtcattttcttctcatcacttaaaaaaacggcgctagtttacgccctgtgagtccgtaagcaaactaggttaacgattgcgtgaaaattaaccattgcattgtcaacgtaaagcagtatcatgcggcggctcgaaaaaagggtaagcacgttattatgttaaggtaacagacgtgtcgtacgtattgggttccctcaccccaatggttaatcaaaaaggtacaatatgaacgttttcagccaaactcaacgctataaggcgttgttctggttaagcttatttcatctgctggtgatcacctccagtaactatctggttcagcttcccgtctccattttgggtttccataccacctggggcgcgtttagctttccgtttatttttcttgctaccgacctgaccgtgcgtatttttggcgcaccgctggcccgacgcattatcttcgcggtaatgatccctgcgttattaatctcctacgtcatcagcagcctattctatatgggttcctggcagggattcggcgcactcgcccacttcaacctgtttgtcgcccgtatcgccaccgccagtttcatggcctacgcgctggggcaaatcctcgacgtgcacgtttttaaccgcctgcgtcagagtcgccgctggtggctggcaccgacagcgtccacactgttcggtaacgtcagcgacacgctggcctttttcttcattgccttctggcgtagcccggatgcctttatggctgaacactggatggaaatcgcgctggtcgattactgtttcaaagtgttaatcagtatcgttttcttcctgccaatgtatggcgtattactcaatatgctgttgaaaagactggcagataaatccgaaatcaacgctttgcaggcgagttaaaggttcgttatcagagttgtgataagatggatgaatgagccgttatggccgtttatcgaaaggaagaagtcaatgcgcaatctggttaaatatgtcggaattggcctgctggttatggggcttgcggcctgtgatgataaagacactaacgctacggcgcagggtagcgtcgcggaaagtaacgctaccgggaatcccgtcaacctgcttgatggcaagttaagtttcagcctgccagcggatatgaccgaccagagcggtaagctgggaacgcaggccaataacatgcatgtctggtccgacgccaccgggcagaaagcagtcatcgtcatcatgggcgatgatccgaaagaagatctggcggtgctggcgaagcgtctggaagatcagcaacgtagccgcgatccgcagctgcaagtggtaaccaataaagccattgagctgaaaggtcacaaaatgcagcagttagacagtattatctccgcgaaaggccagacggcgtactcttccgttattctgggtaacgtgggtaatcaactgctgaccatgcaaattacgctgcccgctgacgatcagcaaaaagcgcagaccaccgcagaaaacatcattaatacgctggttattcagtaagttttaagaactactggcggcctcagggacgtgttccggaggccgtttttttaatcgccacgtcagtaataacgcgattgcgaccagtcccgccgccgccagataaatcaccggtacgcccgcccagctcatcaccagcccagccagtggtccagtcacgccaaggcttaaatccataaatacggtgtaagttgccagcgccgccccctgattttgctgcggaaccgcttttaccgccactacacccaatgccgggaacaccaggctaaacccggcccccgccagtaagacgccgattttcgccatccacggcatagtcgccacgccaaccagtagcaggccgattatctcaacgctaaagcaaatcatcgctacgtttaagccaccgatacggttaatgccgttagggaataacaaacgcgtaccgacaaacgcacagctaaacagcgtcagcgcgaaagccgcaccgtcccaacctttagcgtcataaaacagcgtgataaaggtggcgatgacgccaaatccggcggaagccagtgccagcgccataccgtacagccagacgcgcccaagcaccgcgcgaaacggcagcggtttgcctttactggcttttaccgtcggacgcgggatcgccaacaaaatggccaccagcgccacgcccataatgattaacgctaacgcctgcaagccgccccagtgataaaacacgacgcctaacggcgcacccatcgccatcgccccgtaagtgacaatgccgttccagctaatcacccgcccgatatgcaggctgccaaccacgccaacgccccatagggtgcttcccgttccggcaaaactttgcccaatcccaaggatgacgcgccccaggcaaagtaataacaggctgatgacaggcagactggcggttaatcctgccgtcagataccccagaccgctcaaaaagcagccgcataaaccgaagacgacaatctttttgggtcccaggctatcggcgtaacgtccggcatgagggcggctcagcaaggtggcgaaatattgcaggctgataaccaatcctgcccagaaggcgctaaagcccatcacatcatggacatagcccggtaatacagcgagcggcaacccgatggtgaggtagctggcgaagttaaacatgactatagagacaatgcgcaaattcaggcgcaatccgtttagcgcgggttcggctacgggttcgggcatgaggatcaccacatttttacaacagtgtttcatttttaccacgtgctgacgtgaaaatcagcagtaagaatcagaatattgctggcgtgactcccgctacacttaatacaaaaagtcacaaggaagccccaatggaaacccctcaacccgataaaacgggcatgcacattctgctcaagctggccagcctggtagtgatcctcgcgggcattcacgcagcggcagatatcattgtgcagctgttactggcgctgttttttgccatcgtcctcaacccgctcgtcacctggtttattcgtcggggagtacaacgccccgttgccattacgattgtagtggtggtgatgctgatcgcactaaccgcgctggtcggcgtactggcggcaagctttaacgaatttatctctatgctgccgaagtttaataaggagctgacgcgcaaactttttaaattgcaggagatgttgccttttcttaatttgcatatgagcccggagcgaatgctgcagcggatggacagcgaaaaagtggttaccttcaccacagcgctaatgaccgggctttccggggcaatggcgagcgtgcttttgctggtgatgaccgtagtttttatgctgtttgaagtgcgccacgtcccttacaaaatgcgttttgcgctgaataatccacagattcacatcgcgggattacaccgcgcacttaaaggcgttagccactatcttgcattgaagacgctactcagtttatggacaggtgtcatcgtctggctggggctggagctgatgggggtgcagtttgcgctgatgtgggcagtactggcgtttttgctcaactacgtgcccaatatcggcgcggtaatttccgccgtaccgccaatgattcaggtgctgctgtttaatggtgtttacgaatgtattctggtcggcgcattgtttttagtggtccatatggtcatcggcaatattttagaaccacggatgatgggccatcgcctggggatgtccaccatggtggtatttcttagtttgttaatttggggatggctgctcggcccggtagggatgctacttagcgtgccattaaccagcgtgtgtaaaatctggatggaaaccaccaaaggcggtagcaaactggcgattttactggggccgggcagaccgaaaagtcggttaccgggatgaggcgacaagtgatacgatacgcactttcattttccattaaacgttggccctgatatgtatcggatagttctggggaaagttagcaccttaagcgcagctccactgccaccgggtttacgcgagcaagcaccgcaaggtccacgacgcgaacgctggctggcggggcgtgcattgcttagccacacgctttccccgctaccggagatcatctatggcgaacaaggcaaacctgcatttgcgccggaaatgccgctatggttcaacttaagccatagcggtgacgatatcgccctgctgttgagtgatgaaggcgaagtcggctgcgatatcgaagtgattcgcccgcgcgccaactggcgctggctggcgaacgccgtattcagcctcggggaacacgctgagatggacgccgtgcatcctgatcagcaactggaaatgttctggcgcatctggacgcgcaaagaagccatcgttaaacagcgtggcggcagcgcctggcaaatcgtcagcgtagacagcacctatcactccagcctgagtgtcagccattgtcagcttgaaaatttaagccttgcgatctgcacccctactccctttacgctcaccgccgacagtgtgcaatggatcgatagtgttaactgatccgcccacccgactgcccatctattgatccagaacaggtaatcagtatgacgaatacttaaaatcgtcatacttatttccgccatctattttaatccattggggttaccatgctctccacactccgccgcactctatttgcgctgctggcttgtgcgtcttttatcgtccatgccgctgcaccagatgaaatcaccaccgcctggccggtgaatgtcgggccactaaacccgcacctttacacgcctaaccagatgttcgcccagagcatggtttatgaaccattggtgaaatatcaggcagacggtagcgtgatcccgtggctggcaaaaagctggactcatagtgaagatggtaaaacctggaccttcaccctgcgtgatgacgtgaaattctccaacggtgaaccgttcgatgccgaggcggcggcagaaaacttccgcgcagtgctcgataaccgtcaacgtcacgcctggctggagctggcaaaccagattgttgatgttaaagcactcagtaaaacagagctgcaaattaccctgaaaagcgcctactatcctttcctgcaagaactggccctgccccgtcctttccgttttatcgctcccagccagtttaaaaaccatgaaaccatgaacggaattaaagcgccgattggcaccggaccgtggattttgcaggaaagcaaactgaatcagtacgatgtcttcgtccgtaacgaaaactactggggcgaaaagccagcgattaaaaagatcacctttaacgtcatcccggacccgactacccgcgcggtggcgtttgaaactggcgatatcgacctgctgtacggaaacgaagggttattaccgctcgataccttcgcccgctttagccagaatccggcttaccacacccaactgagtcagccgatcgaaaccgtgatgctggcgctcaataccgccaaagcccccaccaacgagctggcagtacgtgaagctcttaattacgcggtaaacaaaaaaagcctgattgataacgcgttgtatggcacccagcaggtcgccgacaccctgtttgccccttctgtgccctacgccaacctcggcctgaaaccgagccagtacgatccgcaaaaagcgaaagcgttgctggaaaaagccggttggacgctgcctgcgggcaaagacatccgcgagaaaaatggtcagccgctgcgcattgaacttagcttcatcggcaccgatgcgttaagcaaaagcatggcggaaatcattcaggctgatatgcgccagattggcgcagatgtcagcctgattggcgaagaagagagcagtatctatgctcgtcagcgcgacggtcgttttggcatgattttccaccgcacctggggcgcgccatatgatccacacgccttcctcagtagtatgcgcgtaccgagtcacgctgacttccaggcacagcaaggattagccgacaaaccgctgattgataaagagatcggcgaagtgctggcgacccatgacgaaacgcaacgtcaggcgctgtatcgcgacattctgacccgtctgcatgacgaggcggtttatctgcctatcagttacatcagtatgatggtggtaagtaaaccggagctgggtaacatcccctacgcgccgatcgccaccgaaattccgttcgaacagattaaaccggtgaaaccttaatgttgcgttacgtattacgccgctttctgctgctgatcccgatggtgctcgccgccagcgtgatcatttttctgatgctgcgcctcggtaccggcgacccggcgctcgattatttgcgtctgtctaacctgccgccgacgccggagatgctggcctctacccgcaccatgctgggactggatcagccgctgtacgtccagtacggcacctggttgtggaaggcgctgcatcttgactttggtatcagtttcgccagccaacgcccggtactggacgatatgctgaacttcctgcccgccacgctggaacttgcaggtgcggcgctggtattaattctgctcacttccgtaccgctcggtatctgggcggcgcgccatcgcgaccgtctgccggatttcgccgtacgtttcatcgcgtttcttggcgtgagcatgcctaacttctggctggcgtttttactggtgatggcgtttagcgtgtatctgcaatggctacccgcgatgggttacggcggctggcagcacatcattttgcctgcggtttccattgcctttatgagcctggcgattaacgcgcgtttactgcgcgccagtatgctggacgtcgccggtcagcgtcacgtcacctgggcgcgtctgcgcggcctgaacgacaaacagaccgaacgtcgccacatcctgcgcaatgccagcctgccgatgatcaccgccgtggggatgcatatcggcgaactgattggcgggacgatgattatcgaaaacatctttgcctggccgggcgtcgggcgctatgcggtgagcgcgatttttaaccgtgactatccggtgatccagtgctttacgctgatgatggtggtggtttttgtggtctgtaatttgattgtcgatttgctcaacgccgcgctggacccgcgcattcgtcgtcatgaaggagcgcacgcgtgaactttttcctctcttcccgctggagcgtacgcctggcgctgatcattatcgccctgctggcgctgattgcgctcaccagccagtggtggctgccgtatgacccacaggcgattgatttgccgagccgcctgcttagcccggatgcgcagcactggctgggcaccgatcacttaggtcgcgatattttcagccggctgatggcagcgacccgcgtgagcctcggtagcgtaatggcctgcctgctgctggtgctgacattagggctggttattggcggcagcgccgggttgattggcgggcgcgttgatcaggccaccatgcgcgtcgccgatatgtttatgaccttcccgaccagcattctgagcttctttatggttggcgtgctcggcaccgggctgaccaacgtaattatcgccatcgccctgagccactgggcgtggtatgcacgcatggtgcgcagcctggtgattagtctacgccaacgcgagtttgtgctggcgagtcggctttccggtgcgggccatgtgcgggtgtttgtcgatcatctggcaggcgcggtgatccctagcctgctggtgctggcaacgctggatatcggccatatgatgctgcacgtcgcggggatgtctttccttggcctcggtgtgaccgcgccgaccgccgaatggggcgtgatgattaacgacgcgcgccagtatatctggacccagccgctgcaaatgttctggccggggctggcgctgtttatcagcgtgatggcctttaacctggtgggtgacgcactgcgcgatcatctggaccctcatctggtgacggagcacgcacactaatgccgcaacagattgaactacgtaatatcgcgctacaggccgcgcagccgctggtacacggtgtaagcttaaccctgcaacgcgggcgcgtgctggcgttagtcggcggtagcggcagcgggaaaagtttaacctgcgccgcaacgctgggcattttgcccgctggcgttcgccagacggcgggggaaattttagccgatggcaaaccggttagcccttgcgccctgcgcggcatcaaaattgccaccatcatgcagaacccgcgcagcgcctttaatccactgcacaccatgcacacccacgcgcgggaaacctgcctggcgttagggaaacccgccgatgacgctacgcttaccgctgccatagaagcggtggggctggaaaacgccgcgcgcgtgctgaagctgtacccgttcgagatgagcggcggcatgttgcagcgcatgatgattgcgatggcggtgctgtgtgaaagtccgtttatcatcgccgatgaaccgaccaccgaccttgacgtggtagcacaggcgcgcatcctcgatctgctggaaagcattatgcaaaaacaagcgccgggaatgctgctggtgacccatgatatgggcgttgtggcgcgtctggcggatgacgtggcggtgatgtctgacggtaagattgtcgaacagggcgatgtagaaacgctgtttaacgcccccaaacatacagtgacgcgcagcctggtttccgctcatctcgccctctacggtatggagctggcaagttgacctaatacggtatggagctggcatcatgactttacttaacatctccggcctttcccatcactatgcgcacggtggatttaacggaaaacatcaacatcaggcggtgctgaataacgtttccctgaccctgaaaagcggcgaaaccgtcgccctgctggggcgcagcggctgcgggaaaagtaccctcgcgcggttgctggtgggtttagaaagccccgcgcaggggaatattagctggcgtggcgaaccgctggcgaaactcaatcgcgcccagcgtaaagcgttccgccgcgatattcagatggtatttcaggactccatcagcgccgtgaatccgcgcaaaaccgtgcgcgagatcctgcgtgaaccgatgcgccacctgctaagtctgaaaaaatccgaacaactggcgcgcgccagcgaaatgctgaaggcggtcgatctcgatgacagcgttctcgacaaacgcccaccgcagttaagcggcggccagctccagcgcgtctgcctggctcgcgcgctggcggtcgaaccgaaactactgattctggatgaagccgtttctaaccttgatctcgtgttacaggcgggtgtcattcgcctgctgaaaaagctacaacaacagtttggcaccgcctgcctgttcatcacccacgacttacgcctggtagaacgcttttgccagcgggtaatggttatggacaacggacaaatcgtcgaaacccaggtggtgggagagaaattaaccttttcctctgacgccggacgtgtgctacaaaacgcggtattacccgcattccccgtgcgccgtcgcaccacagaaaaggtttaacgcaaatgcaacgagtcaccatcacgcttgatgacgatttactggagacgctggacagcctgagccagcgtcgtggttataacaaccgttccgaagctatccgcgacattctgcgtagcgccctggcgcaagaggccacccagcagcacggcacgcaaggtttcgcggtgctgagctatgtgtatgaacacgaaaaacgcgacttagccagccgcattgtctccacccagcatcatcaccacgacctctccgtcgccacgctgcatgtgcacatcaaccacgacgactgtctggaaatcgccgtgttgaaaggtgacatgggtgacgtgcagcattttgccgatgacgttatcgcccagcgcggcgtgcggcacgggcatttgcagtgcttgccgaaggaagattgagttacgccattgtcccaatcgtcttcctgaatcgcagcagcgcaatggtgaaaaatgcgccgccaattgccatcagcgtcagaaactgcggccagacgatttcgaatccggcaccccggtagaggatggcctgcgcgaggctaacaaagtgtgtcgtcggcatggtcagcataatgtcctgcaccatctgcggcatactttcgcgcggcgtggaaccaccggaaagcatttgcagcggcagcagcaccagaatcaccagcagccccagttgcggcatactacgcgctatcgtccccataaaaatgccgatactcgtggtggcaaacagactgagcgccacgcccagcataaacagcgggatgctgccttcaatcggtacgcccagtacacctttcaccatcagcaccaggcttaatccgcttaccaccagcaccaccagccccatgctccagatcttcgccatcatgatctcaaacggcgttatcggcatcaccagtaagtgttccaccgtgccgtgttcacgctcgcggatcagcgcgcttccggtcaatacaatcgccagcatggtaatgttgttgatgatcgccatcaccccgccaaaccacgcgggatcgaggttcgggttaaagcgcatccgggtttccaggcttaccaacggttcgctgttatcacggtagcgcgcgacaaagctgttcacttcaccgttgataatattctggatatacccattgccggtaaatgcctggctcatgcgcgtggcatcgacgttcacctgaatatccggctggcgtccggcgaggacatcacgctgaaaattaggcggaatatttatcgcgaaggtatagcgtccggcgtccagtccggcatccatctcatcggcggtgatcatctccggtggcaaaaaccacggacgatagaagctgttaacgatccggttgcttaactggctttgatccatatcggcaatggcgatcggcgcgaggttcaagcttcctggcgtaacggtcgcactgctatacacgctcaccgtaaagctgaagacaatcagcgtcagcatcgctttatcaccgagcagactgcgcaactctttgatacccagattaaaaatattgcgtaaatggcgcatcatccctcctgttttttcagcagcaggatacttaagcccatcaccagcgggatggctatcagtaacgggataaaaagttgccacaaatcagtcagatccagcgctttgctgaacgtcccgcgggcgatagtcagaaaatgactggtcgggtaaacctcgccgatccaacgtccaggcccttccaggctagctaccggatcgatcatcccggaaaactgtgtcgccgggatcaacgtgataatcgccgttccgaaaatggcggcaatctggcttttcataaaggtggagatcagcagccccattccggtggcaatgatgatatacagcagcgccgccagggtgagcgtcaggaaactgcctttatgcggtacgccaaacacaaacacgctcaggccgcagagcaggaaaaagttcagcatccccagcgcgatgtatggcaactgtttaccaagcaaaaattcactacgcgtggtgggggtcacgtaaaggttgataatgctcccaagctctttttcccgcaccacgctaagggcgcttagcatactcgggatcatcatcagcagaagcgggatcaccgccggaacaatcgctggcaggctttttacgtccgggttatagcgatagcgcgtctcaatattcatcagcccgctttggctggcgggtgtgctttgtcggctcgccacatcctgtaaccagctctggtgcatggcctgcacgtaaccttttaccgtttcagcacggctcggcatcgctccgtcgatccagacgccgagttccacaggcgtaccacgcgcgatatcgcgcccgaaattgggcgggatctcaatcgccaccgtgatatcgcccgcacgcatccgacgatcaagctcgtcataactggtgagcggcggctgttcgataaagtaacgggaaccggagaggttgagtgtccacgcctggctactgacggtctggtcgcggtcgagcaccgcaaagcgcaggttttccacatccatactgatgccgtaacccattatcagcatcaggatcaccgttcccatcagcgccagcgtgctacgtactggatcgcgtcgcagttccagcgcttcgcggcggctgtagctaaacagacggcgcaggctaaatccctgacgcggcgcgtgggtggtgtcgtgtaccacgggcggcgcttcggcttcgttgctctgccctgccgcttcctgcaaataggcgataaatgcctcttccagactggcggctccgcgtttctcaaccagttcctgcggtgtaccgctggcaagcacttttccggcgtgcatcagactgatgcggtcgcaacgttccgcttcgttcataaagtgggtggagatgaagatagtcactttgtcctggcggctgagatcgaccatcaactgccagaacatatccctcgccaccggatcgacaccagaagtaggctcatcgaggattaacatctccgggcgatgaatcaccgccaccgccaggctaagccgctggcgaatgccgagcggcaaactctccggcagaatatcttcaacgtcgttgagcttaaaacgctcgctcatttcagccactcttgcgggaatttccgcttccgggatgtgaaacaaacgggcatgtaactcaaggttttgccgcacggtgagttcgttatagaggctaaacgcctggctcatatagcccacccgacggcgggtatcgatatcttttggatcaaccggttgcccgaacagccacgcctcaccttcgctggcgggcagcagtccggtgagcattttcatggtggtggatttaccgcagccgttgctaccaagaaaaccaaaaatctccccgcgtggaatgcggaaattaacgtgatcaacggcaacgaaggaaccaaaacgcatggtcagatcgcgcgcttcgatggcaatctctgcgttttcaggttgatacggtgggatcactaccgcctgatgcgcctggcgttgcgcttgcggtaacagatttataaatgcttcttccagcgtagcgctttgcgtttgctgccgtagctcttcggcgctgccagttgccagcacttctccggcattcatcgctaccagccagtcgaagcgttcggcctcttccatataggcggtggcgaccagcacgctcatattgctctgccgctggcgaatactgtcgatcagatcccagaactgggagcgggagagcgggtcaacccccgttgttggctcatcaaggatcaacagttccgggtcgtggattaacgcgcagcacagcccaagtttttgcttcatcccgccggagagtttccctgccggacgatcgcgaaacggtgctaacccggtgctggtcagcagctcattgattcgcacttcccgctccgctttgtcgtgaccgaacaggcgagcgaaaaaatcgacgttttcatacacgctcaaggtgtggtagaggtttttgcccagcccctgcggcatccaggcgatgcgcgggcagacgtcgcggcgatgcttcgggtcgcgcatatcgccgcccagcaccatcacattgccctgttcaatgacgcgggcaccggaaatcaagctcaacaagctgctcttcccgacgccgtccgggccaatcagcccgaccatacagcgggccggaatatcgagagtgatattgttcagcgcaacggtttttccataatgctggctcacgcccgccagttgcgcgacaggcgggacgggaaccagttccagatgcgtcattgcggcaacctcaccacgaggtcgtcaggccacggaagttcttcattcacccgcacccacgctacgcccggcaaaccggttttgacatattccagatgctgctggagtaattccggtgggatacgcgctttgacgcggaacatcagtttcagccgttcatcgctggtttcgacggtttttggcgtgaactgggcgacactggcgacaaaactgatggttgcaggaatacgcagatctggcgcggcatcgaggatcagccgggcttcaccgcccagtttcagcgtgcccgcctgttcggttggcaggaagaaagtcatatagacgtcgctgagatcgaccatattcagcacccgaccgcctgccgccagcacttcgcctggctcggcaacccgatactgcacgcgtccgtcacgcggggctttcagttcgctgtcatcgatatctgcggcaatgcgccgttcagtggcttgtgccgcttcgacgcgggtttgcgcctgaatgatattggtgcgtgccgcttctatagccgctttagaagcgcttacctgagctttcgcgctttccagcgcagctcgggcgctctcagcggcggcgcgatcgtcatccagctgttgcgcagaaatagcccctcgttgggccagactacgggaacgcgtatgacgttttgctacggagtccagttctgcctggcgttgattaaccaggctctgtgcggcacgagtttcgctttgtcgttgctccagcaaagcctgcgcggcagcaacggcgctttgtgcctctttgatttgcgcgatggcttccagtcgctgttcctgcaacacgcgagtatccatcttcgccagcacttcaccttcgcgaacaaacttgccttctttcaccagaatggtgtcgatacgcccggcaattttgctggcaatatccacttccgtcgcttcaatgcgcccattactgacagcaaagccttccggcacacctgccgggcgcaacagccaccacgccacgatagccgccaccgccagtaacccgacaacccaccacgccagatggcgcttactcttatccataatcgacccgccataatccctgtaagcaaacgacgcgtgttacaactgccgccgaacgacgttcagcggattcttccatccgggataagaaggaaacggcaaatacgaccagcgcgcagagcattgagcgccaacggggaaggcttagtgaaaacgggtagtaatgttgtcatcatcagcattcctggccgtaaatgaaacacgcatactcataagtgtgatctataaaactggctgacaaaacggtatccatcctgttggatagcgtttcacgcctgttcagttgcaggaacagagcattcctttttacgttttatcaacagtctcaaccagatagtaacattaatattcatgttgtctatggttcagagctgtaacattgtgcgccttctaatcaaaggcataagtccatttctgtttttttcatgctggtaagacttccagggagtggttatctcaggccctgcaccagggttaatttggcaattatgcatgctgaacattcttccagcatgtttactgtcacgggcgttaagacctaaaactgtccccgtttcgcctatgcgttctcttccaccatttccgttatgtgcaacaacttgatttatacctaacatttgactacatgctaatagtgcttcaagtttaggtctgtaatctgtgctaacagaaaaataacgattaaaggatcgacaagagatagcccggctagttttaaactttttgccattaattatagcatgatgctttttattgataattgccgctaattcgaccggatcgagagcattggtcatttcatcaatagagactgttatcggtcctataatgtaacgttttcgctgatcatcaaaagttatcccatgatgatttgccattattttgtatttggggtcatagaaacatacaggataatcttttatcccagagtaggtatcctcatcgagtggtttcatacgcgtgaagttctgcatatagttaccattgcaattcgtttcatgatttccagctaatacatgaacattttcattgatactcattatgcgttttaacaaatcgatgataaattgatcaccacagatattgctaaatcgatcgccggtttggtcgcccagaaacgtacatggcgtcacagcgtctttattaataactaaataaggctgaagactttctaaaataatgtctcttctgttcaggatactgattattgtattaacattagtgttaagttgctcattaaagttctcccttagcaatacgttgagaacttcatcttctatattaagcaactggctaaggaaattttctccttcagccatgattcccaaatgtcccgttgcgaaaagcgcgaacaaaactgcaccgacactgccatcggtatcaccaaaataggttggtctggtacttgtgggatcaacgggtaaacaattggagaaatagattctgtcagcgaactggggttttatcattgtttcgaatttaatatcagatacattatattggcttattttccagttccagatgggtttgtagctctcagtaactgcaacatcattagcattatcatttactgtcatattattaagtaaataaacaatactgcaccaattaatatcggtattatcaagagagcaaccgtaatttttgctattaattgtcacaataaactgataattattattcctacgtagaatatgagcacgcatgccgcttagcatactatatttttcactatgatccgtttgtatggtaaaactaattttgtcatcttgaatagattgttggaaccgttctatttgccaatcatctattttttccacaacctcaccgagcattgtcctggcaatactacttatatcatcacctataccatttgcaatatacccaaacagttctttagtgaagttggtaacatgctcttgcaccatatcatttgttgcgattgtcgttgtactgtcgttagtgcctgccacagttccaattttcatattttacctcatattatttaccgcgaggaatacatagttaacattttatcttatgacatacacctcatgttcgatgggaaaataattatattttgcacaaatcattcagcctcaaagcataatatgaaatttcttatctcatagcagagaaagtccctaaagattgtagaggcgtcatcagaacatgcctctacaatcgattaagaaaacctatgaaatactggcaggattaaaaagacataccaccgtattcatggagttttaatgtagttgaaaacaactaagcccactggaataaattattttattatttttatcacgtgcttccttcagggaatttagccccataataccattatcaaattgttgattatgatctaccccgggcccatgatgcccatatttttgtctaatgtatttgctggggtcttcacctttgagtgtctccccacatatgaagatacgttcacgtgctggtctgaaatcagtagtgttatcaaaataattagcatatacaggtgtgggtttcaaagtattgcttcggattagatggaatagaggatcatccatgtgttctttatgttttttattaaaaatattggctaattcctcaggatcagtaggatttttcatctgattaaatggaacctgcaaagcacgctgacaataacatttttttcttcatctcttattattccgtgatgactggttaaaacttgcctttcactgtcataattacaaacatcgagcgttttaattaagttatacgtatcaccggcagagagtttatgatttgctagtcgtgcagtatagttaccattaaaattgatttcatgatttccagccagaacgacgacatttttattaatacggctatctttattaccctccatatttcgcatagaatttagcaaagtaaggatatatttatcaccaaaaatagtactaaatctatcgcctgtatgatccccaaggaagatacaaggggttatcgcatcgtcctttaaaaaaacatgttgatgcaactcattcaagatcatgtctctcgtatttaataaatcgtagagcactttattatttttatgtttgtatgcagaactagccatctcttcgtgttttaataattcacataataaactccaacccttttccctgatgcctatatgcccactaacgagcaatgcataaagtacagcgcctactcttccatctgtatcgccaaaataagccgtgttggcattttgtgggttaatcacaccacactgtttatagaagtctattttactaaacacagatttaacatagctatcaaacttttccttagtaaacgtctctttagagacatcccaacgccagtcaggtttgaaattaccactaagaagagtaaagaaatttctcgctatgatagaaagcccatcaactttataaattatatcacttttatctccagaggaattaataaaataataaccgcccttacactcaacagtaacggtaatgggagagcttaattttaacacatggttattgtctggtataattgtaaagataaacgtatcagtagtattgtcggcgaatctattatattcttgaatatctatagaaggttcactattataaaaccatactttctccatctggtgactacgatcatttaccttccagtgaccatgttgcaggaaatagatgatatgcaggccaaaatcgttatctatttggctatcattatccagtttatcaaattcaactatctttgcacgatgtgttttatcaaccttgccatggtgttgatgactgttaactttatcactatgcttatcttgatggctactagagatgtttctaatctgattgtcaattgctttcataaataacctgtgatatttttgaattgtttgtaacaaaataaatgatacttgtctgaaaaacagatttacgacgatataaaataataatacttatatgttcgctgattttaagcaccgagactatccggtcttttaccaaataatgaagaataatccctccctggaagataattgtaaaaaacaacagcataagaattaatcttaggataaatttttatttatcatggccttttgaacgctgaaaagtagcgctctgcaaagtaaaccccgctatagttatgctatgcatttgtctttaatgatatctcgtcattatattaacaggatgaaattatcattaatgcatatttcaatattagcagggatacctgaggagtttaaagtgaacatatatatcgggtggcttttcaaattaatccctttgattatgggcttaatttgtatcgcgttaggtggctttgtgctggaaagtagtgggcaaagcgagtatttcgtcgcgggtcatgtgctgatttctctggcggccatatgcctggcattattcactaccgcatttattatcattagccagctcacgcgcggcgttaatacgttttacaatacattgttccccattattggctatgcggggagtattatcaccatgatatggggttgggcactgttagcaggcaatgatgtgatggcagacgagtttgtcgccggccatgttattttcggcgttggtatgattgccgcctgtgtaagcacggtggcagcgagttccggtcactttctgctcattcccaaaaatgcagcggggagcaagagcgacggaacaccggtacaggcttattctagtttaatcggtaactgcctcattgccgttcccgttttactcaccctgctcggtttcatttggtctattacgctgttacgtagtgctgacataactccgcattatgtcgcgggtcacgtattgcttgggttaaccgcaatctgtgcctgtctaattggccttgttgccacaattgtccatcaaacacgtaatacgtttagtactaaagaacactggctgtggtgttattgggttatttttctcggcagtatcacggtactgcaggggatatacgtcttagtcagttccgatgcaagcgcccgactggctcccggcattattcttatttgcctcggaatgatctgttacagcatattcagtaaagtctggctactggcactggtatggagacgtacctgtagcttagccaacagaataccgatgattcccgtcttcacctgcctgttttgccttttcctggcaagctttcttgcggaaatggcgcagaccgacatgggatattttattcctagccgagttctggtcggtttgggagcggtatgctttacgttgttcagtatcgttagtatattagaagcgggttctgctaaaaaataattgcaacgtaccggataaaaccagcgttgaccatttgcgtaacgctggtttttcttaggcatcatgaaataacgcagcattaatgcatagtggttaagtataaaaaacagcaaagttactgtttttttcaacctgttcatatttcataaagatctggccactgagtgagttttcaatcacctttccatccaccttatattaagcatggagggtttcagttcacgggctcattagaaaataatcacaagataaccactatcaaaattagctcatttttaatgcgactctaataattttcatctttaggaaataggtcaggagctctttgctgcaatcaaatcctgcgcacaagcccacgcactgctccacgcccactggaagttatagccccccagccagccggtgacgtccatcacttcgccgatgaagtacagcccaggcactttgcgcgcttccatcgtccgactagagagttcgttggtgtccacgccgccgagcgtcacttcggcagtgcgatagccttcagtgccgttgggttgtacgcgccagtcggtcaatgtgctaatcagtgcctgttggtcacgcacgttgagctgttttaggctaacatccgggatttgcccgagttgctgtaagcgttcaaccaaccgcttcggtagatgaaccgccagtgtgtttttcaggctttgattcggatgtgcgttacgctgctcattcaggaaggtttcgaggtccacatccggtagcagattgatgctgacaaattcccccggttgccagtagctactaatctgcaacaccgccggtccagacaagccgcggtgggtgaagagtaagttctcacggaaaacggtgccgttttcagcggtaatcacggaaggcaccgccacgcccgccagcacctgtaactcttcgagcaacggtttatgcagagtgaatggcaccagacccgcgcgggtcggcagcacgttgaggccaaattgttcggcaatcttataaccaaacgggctcgcgcccagccccggcatactcagcccaccagtcgcgatgaccagcttttcgcaaccgacagtcatgccgttcagatcaagcgtgaagcctgtttcatccttcgccacactcagcacttcgctacgcaatctgaaggtcacattgcccttctcgcactcatccaccagcatgtcgacaatctgctgcgcggagtcatcgcagaagagttgccctaacgttttctcgtgccaggcgatgccgtgtttattgaccagatcaatgaaatcccactgggtaaaacgtgcgagtgcagacttacaaaaatgcggattctggctcagataagcgcctggttcgacataaaggttggtaaagttgcagcgcccaccgccagacataaggattttgcgccctggttttttaccattatcgatcagcagaacccggcgtcctgcctgacctgccagcgcagaacagaacatacccgccgcaccagcgcctataataatggcatcaaacctttccacgttgcgctcctcttagaaaaaacgggcgtgaattgtaaagattcctcagtggtcgcaccagcatcaatattactaaaaggaagtatttgcctgaattatataagataattattttttgagtgaaatccatacagggggcaaatcaaaaaaagtctatatttcactttgcccgcgccgcgaaagtcactgataatgcgccgcgttcatgtcctcaaaatggcgtaacgtcctatgctacatttgtttgctggcctggatttgcataccgggctgttattattgcttgcactggcttttgtgctgttctacgaagccatcaatggtttccatgacacagccaacgccgtggcaaccgttatctatacccgcgcgatgcgttctcagctcgccgtggttatggcggcggtattcaactttttgggtgttttgctgggtggtctgagtgttgcctatgccattgtgcatatgctgccgacggatctgctgcttaatatgggaagctctcatggccttgccatggtgttctctatgttgctggcggcgattatctggaacctgggtacctggtactttggtttacctgcatccagctctcatacgctgattggcgcgatcatcgggattggtttaaccaatgcgttgatgaccgggacgagtgtggtggatgcactcaatatcccgaaagtattaagtattttcggttctctgatcgtttcccctattgtcggcctggtgtttgctggcggtctgattttcttgctgcgtcgctactggagcggcaccaagaaacgcgcccgtatccacctgaccccagcggagcgtgaaaagaaagacggcaagaaaaagccgccgttctggacgcgtattgcgctgatcctttccgctatcggcgtggcgtttagccacggcgcgaacgatggtcagaaaggcattggtctggttatgttggtattgattggcgtcgcgccagcaggcttcgtggtgaacatgaatgccactggctacgaaatcacccgtacccgtgatgccatcaacaacgtcgaagcttactttgagcagcatcctgcgctgctcaaacaggctaccggtgctgatcagttagtaccggctccggaagctggcgcaacgcaacctgcggagttccactgccatccgagcaataccattaacgcgctcaaccgcctgaaaggtatgttgaccaccgatgtggaaagctacgacaagctgagccttgatcaacgtagccagatgcgccgcattatgctgtgcgtttctgacactatcgacaaagtggtgaagatgcctggcgtgagtgctgacgatcagcgcctgttgaagaaactgaagtccgacatgcttagcaccatcgagtatgcaccggtgtggatcatcatggcggtcgcgctggcgttaggtatcggtacgatgattggctggcgccgtgtggcaacgactatcggtgagaaaatcggtaagaaaggcatgacctacgctcaggggatgtctgcccagatgacggcggcagtgtctatcggcctggcgagttataccgggatgccggtttccactactcacgtactctcctcttctgtcgcggggacgatggtggtagatggtggcggcttacagcgtaaaaccgtgaccagcattctgatggcctgggtgtttacccttccggctgcggtactgctttccggcgggctgtactggctctccttgcagttcctgtaatcgtacgcaccaaaacgagcgggtcagctggcccgcttcagattgtgacatagtgcgctttgttcatgccggatgcggcgtgaacgccttatccggcctacaaaaacatgcaaattcaatagattgcagagattatgtaggcctgataagcgtagcgcatcaggcaattttgcgtttgtaatcagtctcgagcgggtcagtttactggcccgctttttttatgcgttattattgctgaagtgcttaatgccaaatcatcaatgcaatcaggctgaccaccaccagaccacacaatgcgctggtcagaataaactgccgacgcacccgctcacagcggcgaataaattcatcatcgtgatgatcgcgataacgttgggcatagatataccaaacgagacgcacctgtttgttgggttggccatgattggtaaaaaagccccctccatcaacatattgatagagcaatggatcgcagttacgcagtaccactaacaacgcgcgtagactactgaaatagcgcgccatgttaacaatgcaaacgacacataaagcccaaaataatgcgacggtgcttatcatacctcctccccggcgacctgcccgcggagttccaccccggggctaccgctcccgatacgctgccaatcagttaacaccaggtcctggagaaaccgcttttgtggtgaccaacatacgagcggctctatagatagtgtaggagatcaggttgttttttttccagaaggttaaccactatcaatatattcatgtcgaaaatttgtttatctaacgagtaagcaaggcggattgacggatcatccgggtcgctataaggtaaggatggtcttaacactgaatctttacggctgggttagccccgcgcacgtagttcgcaggacgcgggtgacgtaacggcacaagaaacgctagctggccagtcatcgacaactttatggaaggagtaacactatggcttataaacacattctcatcgcggtcgacctctccccggaaagcaaagttctggtagagaaagcagtctctatggctcgcccctacaatgcgaaagtttctctgatccacgtagatgtaaactactctgacctatacaccgggcttattgatgtgaatctgggtgatatgcagaaacgcatctctgaagagacacatcatgcactgaccgagctttccactaatgcaggctacccaatcactgaaaccctgagcggcagcggcgacctgggccaggttctggtcgatgcaatcaagaaatacgatatggatttggtggtttgtggtcaccaccaggacttctggagcaaactgatgtcttccgcacgtcagctgatcaacaccgttcacgttgatatgctgattgttccgctgcgcgacgaagaagaataatcttccctctacgacgtgttcctgaacgcccgcatatgcgggcgttttgctttttggcgcgccttgttacctgatcagcgtaaacaccttatctggcctacggtctgcgtacgcaatcaaaatccccagccaatacaacatttaacaccatcatattttccatcattagtgtgatcatctggttattttctgttgtaatagtgtattaatctattcaccgcatcaatattaagaatctctgacagatgtaaactttttcgcgcgttatcccttacgcgttcatacttttcaggatggtattggaaggttaataaatatgaatacaacaacacccatggggatgctgcagcaacctcgcccatttttcatgatcttttttgtcgagttatgggagcgattcggctactacggcgtgcagggcgtactggcggttttcttcgttaaacagcttggattcagccaagagcaggcttttgtcacttttggtgcttttgctgcgctggtctatggcctcatttccattggcggctatgtcggcgaccacctgctggggaccaaacgcaccattgttcttggagcacttgtgctggcgattggctacttcatgaccggcatgagcctacttaagcctgacctgattttcatcgccctggggactatcgctgtcggtaacggcctgtttaaagctaacccagccagcttgcttagcaagtgctatccgccgaaagatccgcggcttgatggcgcattcaccctgttctatatgagcatcaacatcggcagcttgatagcgttaagcctggcccctgtgatcgctgatagattcggttatagtgtcacctacaacctgtgcggggcggggttaattatcgcattactggtttacatcgcctgtcgtggaatggtgaaagacattggttctgaacccgacttccggccaatgagcttcagcaaactgttgtacgtgttacttggcagcgtggtgatgatcttcgtatgcgcatggctgatgcacaacgtagaagtcgccaatctggtgctgattgttctctccatcgtcgtcaccatcatcttctttcgtcaggcattcaagctggataaaaccgggcgcaataaaatgtttgtcgcctttgtcctgatgctcgaagcggtggtgttttacattctctacgcccagatgccaacaagcctgaacttctttgccatcaacaacgtgcatcatgaaattctcggtttttccatcaacccggtcagcttccaggcgcttaacccgttctgggtggtactcgccagcccaatactggcaggcatttacacgcatctgggtaacaaaggcaaagacctcagcatgccgatgaaatttactctcggcatgtttatgtgcagtctgggctttttgacggcggcagctgcgggaatgtggtttgcggatgcacaagggctgacaagcccatggtttatcgtgctggtgtacttattccagagcttaggtgaactgtttattagcgcccttggcctggcgatgattgctgccctggtgccgcagcatttgatgggctttattctcgggatgtggttcctgacgcaggctgccgcgttcttgctgggcggctatgtggcaacatttaccgcggtgccggacaacattaccgatccgcttgagacgttgcccgtctataccaacgtgtttggtaagattggtctggtcacgctgggcgttgcagtagtgatgctgttgatggtgccgtggctgaaacgcatgattgcgacgccggaaagccattaattattcttgcagaaagcagggtagcgttatcgctaccctgttttagttttacactggcgtacctgcatagatatcaaagcgatgccctttagtgactaccgcgtttggcgtggcgacattcgccagcggtggcgcgtagtccgggcgctttaccaccacgcgtttggtcgccagcaagcgtgcaggctccagtaatccatcggcatcaagatccggtcccaccaggctctgaaagacacgcatctcttttttcactagcgcgcttttctgcttatgcgggaacatcgggtcgagataaaccacctgcgggcgcggggtaatatcagtcagcgccgtcaggctggaggcgtgaattaactgcaaccgctcctgcaaccagccgccgatttccgcatccgcataaccacgcgccaggccgtcgtcgagtagcgcggcaaccactggattacgctccagcatccgcacgcggcagccgacactagccagtacaaaggcatcgcgcccaagtcctgcagtggcatccaccacatccggcaaataatcgcctttaatgcccaccgctttcgccaccgcctcaccgcgaccaccgccgaatttgcgtcggtgcgccatcgctccgccaacaaaatcaacaaagatgccgccaagttttggctcatcacgcttgcgcaattccagatgttccggcgttaacaccagcgccatcaggttgtcttcatcgtgctccagcccccagcgggccgccagaacagataaggcaccgtctccggtgcctgtttcatcaattaagcagattttcactgaatgatcagcccttaatgccgtaatgctccagcatcgcatccagctgcggttcacgaccacggaagcgtttgaacagatccatcggctcttcactaccgccacggctcagaatgttgtcgaggaagctctgcccggtttcacggttgaaaatgccctcttcctcaaagcggctgaaagcatctgccgccagtacgtcagcccacaggtagctgtagtaacctgcggcataaccaccggcgaaaatatggctgaaagcgtgcgggaaacggccccaggacggagatggcaccacggcaaccagtttcttgatttctgccagagtttcgaggatttttgccccctgatccgggcggaactcggcatgaaggcggaaatcaaacaggccgaactccagctgacgcagaataaacagcgccgcctggtagttcttcgccgccagcattttatccagcaactctttcggcagcggttcgccggtttcatagtgaccagagataaacgccagcgcctccggctcccagcaccagttttccataaactgactcggcagttcgaccgcatcccacggcacaccgctgataccggaaacaccagcggtttcgatgcgggtcagcatatggtgcaggccgtgaccgaactcgtggaagagggtgatcacttcgtcgtgagtgaacagcgccggtttaccatttaccgggcggttgaagttacaagtcaaatacgcgaccggtttttgcaaagaaccatcagctttacgcatctggcctacgcagtcatccatccacgccccgccgcgcttgttttcacgggcatacagatcgaggtagaagctaccgcgcagttcgttattttcgtcatacagttcgaagaaacgtacatccggatgccagacatcaacatctttacgctctttagcggtgatgccgtaaatacgcttaaccacttcaaacaggccgttaaccgctttgttttccgggaagtacggacgcagctgttcgtcactgatgctgtagaggtgctgtttttgtttttcgctgtagtaagcgatatcccacggctgcaactcatcgacgccaaattcggctttggcaaaggcacgcaattgcgccagctctttttcgccttgtggacgcgcgcgttttgccagatcggttaagaaatccagcacctgctgcgggttttctgccattttagtggcaagggatttaaaggcgtagttttcaaagcccagcagttgcgccagttcgtgacgcagcgcgaggatctcttccatcaccttgctgttatcccatttaccggcgtttgggccttgatcggaggcgcgggtgctgtaagcgcgatacatctcttcacgcagagcctggttgtcgcagtaggtcattaccggcaagtagcttgggatatccagcgtcagcaaataaccttccagctctttcgcttcggcctgggcttttgccgcagccagcgcgctttctggcatccccgccagctccgcttcgtcggtaacgagtttggtccagcccattgtcgcatcgaggacgttgttgctgtactggttgcccagttcagaaagacgggtcgcaatttcgccgtaacgctgctgtttctctttcggcagacctatgccagagagttcaaagtcgcgcagtgcgttatcaaccgctttcttctgcgccgtgttcagcgtggcgtaatgatcgccatcgcgcaggtcgcgatacgctttatacagcccttcatgttgccctacccaggtgctgtattcgctcagcagcggcagggtttgttcgtaggcttcacgcagttccgggctatttttcacgctgttcaggtggctgaccggggagaagatacgccccaacacatcgtccacttccgccagcggctggcagagattttcccaggtgtacggtgccccttgcgctactacgcgctccacgttttcgcggcagtcgttcaatgccttagtcacggctggaacgacatgttccgggagaattttagaaaacggaggcaattcaaagggagtcagtaacggattcgtcattcgcgcagtcctggttaaagaggttaaggaagcgctcaacaggcgctttacataatgtgtgtagcatggggttaagtgtagtgaatttcaatgagaaacgttacgctttcgcggcggcggcctcttttcggtatactgtcctgatacgcttttgtgcgccccgaatacgggccgatttttacttaccggaacacctttacccatgctcagttatcgccacagctttcacgctggcaaccacgccgacgtccttaaacataccgttcagagcctgatcatcgagagcctgaaagagaaagataaaccgtttctctatctcgacacccacgcaggggccgggcgttatcagttaggcagcgaacatgccgagcgtaccggcgaatatctcgaaggcatcgcccgtatctggcagcaggacgatttgcccgcagaactggaggcgtacatcaatgtggtaaaacacttcaaccgtagcggtcagttgcgttactaccccggtagcccgttgattgctcgcctgctactgcgtgaacaggacagcctgcaactgaccgaactgcacccgagcgattacccgttgttgcgttctgaatttcagaaagatagccgtgcgcgtgtcgaaaaagccgacggtttccagcagcttaaggccaaactgccgccggtttcccgccgtggtttaatccttatcgacccgccgtatgaaatgaaaactgactatcaagcggtggtcagcgggatagcagaaggttacaaacgtttcgccactggtatttacgcactgtggtatccggtggtgctgcgtcagcaaattaagcgcatgatccacgatctggaagcgaccggtattcgcaaaattctgcaaattgaactggcggtactgccagacagcgatcgccgtggcatgaccgcttccggcatgattgtgattaacccgccgtggaaactggaacaacagatgaataacgtgctgccgtggctgcacagcaaactggttccggcaggcaccgggcacgccaccgtaagctggatcgtgccggagtaattgcagccattgctggcacctattacgtctcgcgctacaatcgcggtaatcaacgataaggacactttgtcatgactaaacactatgattacatcgccatcggcggcggcagcggcggtatcgcctccatcaaccgcgcggctatgtacggccagaaatgtgcgctgattgaagccaaagagctgggcggcacctgcgtaaatgttggctgtgtgccgaaaaaagtgatgtggcacgcggcgcaaatccgtgaagcgatccatatgtacggcccggattatggttttgataccactatcaataaattcaactgggaaacgttgatcgccagccgtaccgcctatatcgaccgtattcatacttcctatgaaaacgtgctcggtaaaaataacgttgatgtaatcaaaggctttgcccgcttcgttgatgccaaaacgctggaggtaaacggcgaaaccatcacggccgatcatattctgatcgccacaggcggtcgtccgagccacccggatattccgggcgtggaatacggtattgattctgatggcttcttcgcccttcctgctttgccagagcgcgtggcggttgttggcgcgggttacatcgccgttgagctggcgggcgtgattaacggcctcggcgcgaaaacgcatctgtttgtgcgtaaacatgcgccgctgcgcagcttcgacccgatgatttccgaaacgctggtcgaagtgatgaacgccgaaggcccgcagctgcacaccaacgccatcccgaaagcggtagtgaaaaataccgatggtagcctgacgctggagctggaagatggtcgcagtgaaacggtggattgcctgatttgggcgattggtcgcgagcctgccaatgacaacatcaacctggaagccgctggcgttaaaactaacgaaaaaggctatatcgtcgtcgataaatatcaaaacaccaatattgaaggtatttacgcggtgggcgataacacgggtgcagtggagctgacaccggtggcagttgcagcgggtcgccgtctctctgaacgcctgtttaataacaagccggatgagcatctggattacagcaacattccgaccgtggtcttcagccatccgccgattggtactgttggtttaacggaaccgcaggcgcgcgagcagtatggcgacgatcaggtgaaagtgtataaatcctctttcaccgcgatgtataccgccgtcaccactcaccgccagccgtgccgcatgaagctggtgtgcgttggaagcgaagagaagattgtcggtattcacggcattggctttggtatggacgaaatgttgcagggcttcgcggtggcgctgaagatgggggcaaccaaaaaagacttcgacaataccgtcgccattcacccaacggcggcagaagagttcgtgacaatgcgttaaatgttaaagggctaagagtagtgtgctcttagcccttaattacgtttccgctatcagttcagaagctgaagcagaaagcggatcagttccagcagcgcaattaacgcccctagaacgatgattgctttatcaatcacccgttttctccatgcgatggagtgagaatgcatccgcttactcatccactgcctgtcacggcgcatgtctcattgttagataagaactctctcactccggccagagcatcagttaacggcaccacccgtacttctgaccaggactttgaaagcgtttatgcgcattgccagagtgaaaatgcctcagagctaactggataatcatacagtacatgcaggttataaaaccagcacgtccttgcaatagtttcagtatggtattagcattgatgcgttagatgatggctatctcactccagtcagagccaccaactcagggctggaaagtaaaaaaccgacgcaaagtcggtttttttacatccggattcggacaaggcttaatatgacgatgacccagtgaaagtatataaatcgtcactgcgatatataccgaagtgctccctccgccagctgaagaaatcgctaattcttgcaatgttagccactggctaatagtattgagctgttagataagaactctctcactccagccagagccaccaactcagggctggaaagtaaaaaaccgacgcaaagtcggtttttttacgtcctgattcagacctcctttcaaatgaatagccaactcaaaattcacacctattaccttcctctgcacttacacattcgttaagtcatatatgtttttgacttatccgcttcgaagagagacactacctgcaacaatcaggagcgcaatatgagttttctgttacccatccaattgttcaaaattcttgctgatgaaacccgtctgggcatcgttttactgctcagcgaactgggagagttatgcgtctgcgatctctgcactgctctcgaccagagccagcccaagatctcccgccacctggcattgctgcgtgaaagcgggctattgctggaccgcaagcaaggtaagtgggttcattaccgcttaagtccgcatattccagcatgggcggcgaaaattattgatgaggcctggcgatgtgaacaggaaaaggttcaggcgattgtccgcaacctggctcgacaaaactgttccggggacagtaagaacatttgcagttaaaaatttagctaaacacatatgaattttcagatgtgttttatccgggaggcattatgttactggcaggcgctatctttgtcctgaccatcgtattggttatctggcagccgaaaggtttaggcatcggctggagtgcaacgctcggcgcagtactggcgttagttacgggcgtggtccatccgggtgatattccggtggtgtggaatatcgtctggaacgcgacggctgcgtttatcgccgtcattatcatcagcctgctgctggatgagtccggcttttttgaatgggcggcgctgcacgtcagtcgctggggtaatggtcgtggtcgcttgctgtttacctggattgtcctgctcggtgctgccgttgccgccctgtttgccaatgatggcgcggcgcttattttgacaccgattgtcatcgccatgctgctggctttagggttcagtaaaggcactacgctggcgttcgtgatggcggccggattcattgccgataccgccagcctgccgcttattgtctccaacctggtgaatatcgtttccgctgatttctttggcctcggctttcgcgaatacgccagcgtgatggtgccggtggatatcgccgcgattgttgccacgctggtgatgttacatctctattttcgcaaagatattccgcagaactacgatatggcgctgctgaaatctcccgcagaagcgatcaaagatcctgctacgttcaaaactggctgggttgttttactgcttctgctggtgggatttttcgtcctggaaccgctcggcattccggtgagcgccattgcagctgtgggcgcgctgatattatttgtcgtcgctaaacgcggtcatgcgattaatacgggtaaagtcctgcgcggtgccccctggcagattgtcatcttcagcctcggcatgtatctggtggtttatggcctgcgcaatgccggattaacggaatatctttctggcgtactcaacgtgctggcggataacggcctgtgggccgcgacgctcggcaccggattcctcaccgccttcctctcttctattatgaacaatatgccgacggtactggttggcgcgttgtccattgatggcagcacggcatctggcgttatcaaagaagcgatggtttatgccaatgtgattggctgcgatttgggaccgaaaattaccccaattggtagcctggctacgctactctggctgcacgtacttagccagaagaatatgactatcagctggggatattacttccgtacagggattatcatgaccctgcctgtgctgtttgtgacgctggctgcgctggcgctacgtctctctttcactttgtaatgagatactgatatgagcaacattaccatttatcacaacccggcctgcggcacgagccgtaatacgctggagatgatccgcaacagcggcacagaaccgactattatccattatctggaaactccgccaacgcgcgatgaactggtcaaactcattgccgatatggggatttccgtacgcgcgctgctgcgtaaaaacgtcgaaccgtatgaggagctgggccttgcggaagataaatttactgacgatcggttaatcgactttatgcttcagcacccgattctgattaatcgcccgattgtggtgacgccgctgggaactcgcctgtgccgccctagtgaagtggtgctggaaattctgccagatgcgcaaaaaggcgcattctccaaggaagatggcgagaaagtggttgatgaagcgggtaagcgcctgaaataaagcggcgatatcccccccacaggttgttagaaaagtgcgctttatttatgtcggatgcgacgctggcgcgtcttatccgacctacaaagttatgaaaattcgatgaatagtatgttatttgtaggcctgacaggcgtagcgcatcaggcgattttgctatttacacagtactccctgcgtgagattccaattatcgcgtccagcatggtgtatcagtgagctgcttagttatcagcgatacagcgcagtagtttaaagacgtactggattatgatttatcagtggtttacacaacaaattattaaataattataagataccttaacccattttattattacacatctaaaacatcacaaaaaaaatcacttcacacactatcagagaacataataactttttaaaatgagcgcattttgatagttgttaacgatttcctttacgatactatcactaccctttttttacacacaaatattaccgggtggagataaaagggaaatcaaaggtaattatatcaggaagatataacgcattacatttattgtgtgtagaagaaaatccattcctgttctaattatccaatttaaacatcttagcataaaacaaatgatgaataaggaattttatattgattattagcactttataatcattgaataaaaatagattttatgtacttttaaaacaatgcactatattatggggtgatggatattcatgtcacgccccaaaattaactgagttcacctaaacagaaaggatataaacatcagacaggtttacgttactatcaggcatatcacctcagaatcagatgaaaactataaagaaatatctattatggttttaatatttgttgataaggatagtaacatgaacatgacaaaaggtgcactcatcctcagccttagttttttgcttgccgcatgtagtagtattccgcaaaatatcaaaggcaataaccaacctgatattcaaaaaagttttgttgctgttcataaccagccggggttatatgttggtcaacaagcgcgctttggtgggaaggttatcaacgttatcaatggcaaaacggatacgttgttagaaatctctgtattaccgttggatagctatgcgaagcctgatattgaagccaactatcagggccgactgctcgccagacaaagcggcttccttgatccagtgaactatcgtaatcactttgttaccatcctcggcaccattcagggtgaacaacctggctttatcaataaagtcccgtataacttcctggaagtgaatatgcagggcatccaggtgtggcatttgagagaagtggttaataccacctataacctgtgggattacggctatggtgcattctggccggaaccgggctggggtgcgccttactacaccaatgcggtgagtcaggtaacacctgagctggtcaaataacaccaccgaaagatgcagatgctttctcagcatctgcatcatgcattacatcaaattaatacacagtaagctaactattattattataagccctgtcctgttaattacctttggcaaactgattataaagttaatgtccgcaccaggagtcggttatgtttcttataattaccagggatacgatgttcttcaccgcgatgaaaaacattctgagtaaaggtaatgtcgttcatatacagaacgaagaagagatcgacgtaatgttgcatcagaatgccttcgtcattattgatacattaatgaataatgtatttcattctaattttctcactcaaattgaacgattaaaacctgtccatgtcattattttctccccctttaatattaaacgctgcctggggaaagtgccggtgacctttgttccgcggactatcactatcattgattttgtcgcactcatcaatggcagttactgctctgtgcctgaagcggctgtgagtcttagccgcaagcaacatcaggttctgagctgcattgcgaatcaaatgacaacggaagatattctggagaaactgaaaataagcctaaaaacgttctactgccataaacacaatatcatgatgatcctcaatcttaagcggatcaatgagctggtacgccatcagcatattgattatctggtgtgaatttcaggcttacggtgagtctggctacgctgccacacagattagctaatactaacgcctttcacccctgccataccttttaataatcgcaacaggtcttctatgctcgttgtggcatgaagctggatatcaatggcgaccacttcatgatcttcattttcctgcaagctaactaaatcagtttttattttttgctgcttaaaccagtcgagcatacttaccgtattaccgttcactaatgtcagctgtaaatggtaatttttgttcatcaggcggaaggttaattgatggaagacttccagcaccaacaaggtcatcacactaccataaatacccagttcgtacataccgctgccaataaccatacctatggcggcggtcacccagatatccgctgccgtcgtcagacctacaatattttggttacgaacgagaatgttacctgcaccgataaacccgacgcccgtcaccacctgagcagcaatacggctggggtcgagtccgacgtgatctaaagacagcacgtcagcaaaaccatatttgctaacaatcataaacagggcgcttcccatgccaattaatacatgtgtgcgtaaccctgctcctttgccgcgcatttgcctttccatgccaatagcgccacaggcaattgccgcgagtataagacgtataataaattctgctgtcatataaaaatgcaaaaaggagcagcaagatggctcaacttgctactcctttttacttgcacctcattaattcggcaagtcattagatgcttgatttttgaaggtatacaaatttttctgcgggtttttcttacagtattcgatcactttaggaatttgagtgagatcggtttcatttaaagtaacggtatcgccacctttatatactgtttcttcatgcagcatccaccatgcaaccggggtcattgcttttggattcagatcaataaattcctggcaggtcatatctttagcggattcattggctgccaacgcagattgtgcgttcaccagactcaaagccgctacagcgcccataaaaataaacgctttacggagagaactaatattcattttgtaacccattcaatatagagattatatatgaacaggaggaatagctgcttttaaagaagatattccggcctgttcaatatgcaaggaagtacgatgtaacgcattcccggaattacatatctttcttaattttgtcccattcgcctttaactttatctttaaagttggcttgtttatcctgagtacaagcctgaacgatagctggggttacggttgcaataccctgaacatctaaaaccgcatcttctggtttatctttgttgttcagcgcttcagcaaaaccaactgcagttggctggaaggattcgtccacagccaggaaatcttcacaggtccaggagttgaccggttttttgttatcagctgctttttgcgcatccgctgcattgctcacaactggcagaagaagcagaccaccaagaataacgcctaatacttttttcatcgtaatatcctcaactataaagtgaaagagccgtcacgaatcaatttcgacactgaggttataacctggttttctgtatatgtcatgttgatggaaaatatcaaaatcagatatttttatttcaatacaatgagttacagatgcatcagatactgcaattaggaaatttttattaaatcgactgcattcttagacgcgtttttggcatagattgatagcaggggattttcttcttaattttatagggtggttctatgttatatatagataaggcaacaattttgaagtttgatctggagatgcttaaaaaacatcgcagagcaatccagtttattgccgtgctgctgtttatcgtcgggttgctgtgtatcagtttcccgttcgtctctggcgatattttaagcacagtagtgggtgcattattaatctgcagcggtattgcgcttattgtcgggttattcagcaaccgcagtcataatttctggccggtattatccggtttcctcgtcgcagtcgcctatttattgatcggctatttcttcatccgcgcaccggagctgggcatttttgccattgcggcatttattgccggtttgttctgtgttgcaggggttattcgcctgatgagttggtatcgtcagcgtagtatgaaaggcagctggctacagctcgttattggtgtgctggatatcgtcattgcctggatattccttggtgcaacgccgatggtgtctgtaacgctggtttccacactggtgggaattgaactgatatttagcgccgccagcctgttcagcttcgccagtttgttcgttaagcagcaataattaccccggttgtcacccggatcatagtcacttgatgtgactatgatccgattaatactctctccgctacgcagtgttgtagatcaattgcgcactatcattgaaataattacctgctagtgattatttcaacctactgaatttcatctaatttttttcactctatggcaaattagccatttcaaacattatcatggctgatattttccgtagtcaggtttaatgttttaaaagtgctgtgggaaagtgaacaaagagttccgtaagcgttgatgctatgggcggttaaataagtaatccgggttcatttttttgcaactggcgttgattacattgcataaatatccgtgtctccagacgctatataaaaacctgaagacatgaatgcgttatttactcaggtaatttcaatgcgttaaaagaaagctggcaatccaattgccagcttaagtcgaaacaaggagactcgatatttaaatcggattacattttaactttagtaatattcttcagagatcacaaactggttattgataacttattcttgggcagtaatccgcaaacgttaactttttgtttgctatttacaagctgataacaaccaggaatcttacttaggatcaatatatggagtgcgtgatggataaatctgaagtattgattagtgttaatagacgtattagttcacgaagggtaaagttcttataggcgtttactatattgaacaacgattcggacaaggatgtaaataatgaaaaggatgacatattcgaaacgataacggctaaggagcaagttatgatttttctcatgacgaaagattcttttcttttacagggcttttggcagttgaaagataatcacgaaatgataaaaatcaattccctgagtgagatcaaaaaagtaggcaataaacccttcaaggttatcattgatacctatcacaatcatatccttgatgaagaagcgattaaatttctggagaaattagatgccgagagaattattgttttggcaccttatcacatcagtaaactaaaagctaaagcgcctatttattttgttagccgcaaagaaagtatcaaaaatcttcttgagattacttatggtaaacacttgccccataagaatagtcaattatgttttagtcataatcagttcaaaattatgcaactgattctgaaaaataaaaatgaaagcaatatcacgagcacgctcaatattagccaacaaacattaaagattcagaaattcaacattatgtacaagctgaaactaagacgtatgagcgacatcgtcaccctgggtatcacatcttatttttaatcaggacataagcaactgaaattgatggctggcatgacgagggatgcagatgctgatttcattacccccggtgattactaaaggagaggctaaaacgactttattcccctggtatgtgtatccaccagtagaacccttcgttgcccgaatgctggcaggaactgttggcagaacggcaacattttttttgtcgttgacctcaccatgtcgatcactgtgcctgtatcccaccttactggctgacaaccccactatgccgctggtctgtaaatccctcatatctctcctcgcgcgcaatttaaagaaccgttatttctcaagaattttcagggactaaaatgaacagaagaagaaagctgttaataccgttgttattctgcggcgcgatgctcaccgcctgcgatgacaaaagcgcggaaaacgccgccgccatgacgcctgaggtcggtgtcgtcacactctcccccggtagcgtcaatgtgttgagcgaattgcccggtagaaccgttccttatgaagttgccgagatacgtccccaggtgggcggtattatcattaaacgcaactttatcgaaggcgataaagtgaaccagggcgatagcctgtatcagattgatcctgcacctttacaggccgagctaaactccgccaaaggcagcctggcgaaagcgctctctaccgccagcaatgcccgcatcacctttaaccgccaggcaagcttgctgaagaccaactacgttagccgtcaggattacgacaccgcgcgcacccagttgaatgaagcagaagccaatgtcaccgtcgccaaagcggctgttgaacaggcgacgatcaatctgcaatacgcgaatgtcaccagcccgattacgggcgtcagcgggaaaagcagcgtgaccgtcggcgcactcgttaccgctaatcaggcagatagcctggttaccgtacaacgtctggacccgatttatgtcgatctcacgcagagcgtgcaagatttcttacgcatgaaagaagaggtcgccagtgggcaaatcaaacaggttcagggcagtacgccagtacagctcaatctggaaaatggtaaacgctacagccagaccggcacgctgaaattctccgacccgacagtggatgaaaccacgggctccgtgacgttacgggcgattttccccaacccaaatggtgacttgctgcctggcatgtacgtcacggcattagtggatgaaggtagccgccagaatgtattactggtgccgcaggaaggcgtcacccacaacgcccagggtaaagcaacggcgctcattctggataaagacgatgtcgtgcagctacgcgaaattgaagccagcaaagccatcggcgaccagtgggtcgtcacctctggcttgcaggctggcgatcgggtgatcgtttccggtttgcaacgcattcgtccgggtatcaaagcacgagcaatttcctccagccaggaaaacgccagcaccgaaagcaaacaataacgttgcaggcttaaggggactttcatggctaactattttattgatcgcccggtttttgcctgggtacttgccattattatgatgcttgcaggtggtctggcgatcatgaacttaccggttgcgcagtatccgcagattgcgccaccgaccattaccgtcagcgctacctatccaggtgccgatgcgcaaacggtagaagacagcgtcactcaggtgattgagcaaaatatgaatgggcttgatggcctgatgtacatgtctagtaccagtgatgcggcgggcaatgcctctatcactctgaccttcgagactgggacatctcctgatatcgcacaggttcaagtgcaaaataaactgcaactcgctatgcctagtttacctgaagcagtgcagcagcaggggattagcgtcgataagagcagcagtaatatcctgatggtagcggcgtttatttctgataacggcagcctcaaccagtacgatatcgcggactatgtagcgtctaatatcaaagacccgctaagccgtaccgcgggcgttggtagcgtacaactctttggttccgagtatgccatgcgtatctggctggacccgcaaaaactcaataaatataacctggtaccttccgatgttatttcccagattaaggtgcaaaacaaccagatttccggtggtcaactgggtggcatgccacaggcggcagaccagcagctaaacgccagcatcattgtgcagacgcgtctgcaaacgccggaagaatttggcaaaatcctgttgaaagttcagcaagatggtagccaagtgctgctgcgtgatgtcgctcgcgtcgaacttggggcggaagattattccaccgtggcacgctataacggcaaacctgctgccgggatcgccatcaaactggctgccggagcaaacgccctggataccagccgggcagtcaaagaggaactgaaccgcttaagtgcctatttcccggcaagtctgaagacggtttatccttacgacaccacgccgtttatcgaaatttctattcaggaagttttcaaaacactggttgaggctatcatcctagtcttcctggtcatgtatctgtttttgcagaatttccgtgccacaatcatcccgacgattgccgtaccggtggttattctcgggacgtttgcgatcttgagcgcggtcggtttcaccatcaacacgttgactatgttcgggatggtgctggcgatagggttactggtggatgacgccatcgtggtggtggagaacgtcgagcgtgtcattgcggaagataagctaccgccgaaggaagcgacgcataaaagcatggggcagatccaacgtgcgctggtcggtattgccgttgttctttccgcagtgtttatgccgatggcctttatgagcggtgcaaccggggagatctaccgccagttctccatcacgctgatctcctccatgctgcttagtgtatttgtggcaatgagcctgacccctgccctgtgcgccaccattctgaaagccgcgccggaaggcggtcacaaacctaacgccctgttcgcacgcttcaacacgctgtttgaaaaaagtactcaacactataccgatagcacccgcagcctgttgcgttgtaccggtcgctacatggtggtctacctgctgatttgcgccgggatggcggtgctgttcctgcgcacgccgacctctttcttaccagaagaggatcagggggtatttatgaccaccgcgcagttaccttccggtgccaccatggttaacaccacgaaagtgctgcaacaggtgacggattattatctgactaaagagaaagataatgtccagagcgtgtttaccgttggcggctttggcttcagcggtcaggggcaaaacaacggcctggcgtttatcagtctcaagccgtggtctgaacgtgtcggtgaggaaaacagcgttaccgcgatcattcagcgggcaatgattgcgttaagcagtatcaataaagccgtcgtcttcccgttcaacttacccgcggtggctgaactgggtaccgcgagtggttttgatatggaactgctggacaacggtaacctggggcacgaaaaactaacccaggcgcgaaacgagctgttaagtctggcagcgcaaagtccgaatcaggtcaccggggtacgcccgaacggcctggaagatacgccgatgttcaaagtgaacgtcaacgctgcgaaagctgaagcgatgggcgtggcgctgtctgatatcaaccagacaatttccaccgccttcggcagcagctacgtgaacgacttcctcaaccaggggcgggtgaaaaaagtgtatgtccaggcaggcacgccgttccgtatgttgccggataacatcaaccaatggtatgtacgcaacgcctctggcacgatggcaccgctttctgcctacagctctaccgaatggacctatggtagtccgcgactggaacgctacaacggcatcccgagtatggagattttaggtgaagcggcggccgggaaaagtaccggtgacgccatgaaatttatggcagacctggtcgctaaacttccggcaggcgtcggctacagttggaccggactaagctatcaggaagcgttatccagtaatcaggctcctgcgctgtatgcgattagtctggtcgtggtgttcctcgccctcgccgcactctatgagagctggagtattccgttcagcgtgatgttggttgttccgttaggcgtcgttggcgcattactggccaccgatctgcgcggcttaagtaatgacgtctacttccaggttggtttgctgaccaccatcgggctttccgccaaaaacgccatcctgattgtcgaatttgccgttgagatgatgcagaaagaagggaaaacgccgatagaggcaatcatcgaagcggcgcggatgcgtttacgcccaatcctgatgacctctctggcctttattctcggcgtgctgccgctggttatcagtcatggtgccggttctggcgcgcaaaacgcggtaggtaccggcgtgatgggcgggatgtttgccgcaacagtgctggcaatttacttcgttccggtctttttcgttgtagtggaacatctctttgcccgctttaaaaaagcgtaacgtgtaaatgagagtaaggttgaacatgaaggttcagccttactctttcctgctaaccattcaccactcaacaaccagctaaccgtcaggaataccaggcttagtacacagcactgaaagtagaaaccactccagccattcgtcatcaatttgaacaacacaatactgacccacattcccgtaatcgtatgaattgtcagcttaataatcccaaacatgccgagtcttttcctcctgaaaataccgataccgcctggcaaactgcgaaagagaactagccggtagcccggcagaaatcatcagggaagagtttcacatgaagcaggtgtgagatcctgaccaatattcaaatgcgaaatatgtcaggaaaaggtacctgggctatgttgcgcaaactgatgtggcgttacaccataatattgtcgaaatgtgtttataaagtagcttgtactgctatagccacatttttccgcaatagtatgcagaggaatttgacgtaactcgagtaatcgtctggccatgctcatcctggaggcgagtaatattttactgaaacaggtattttcatcctgcaacttttttttgattagactctcgctggtatacattctttccgcgatatcgcgcagataccaacgtttggcgatatcaaagctaataaggcgttcaacttttccactaacagtgctgatgctattgaaaagtaaggggatcagttctttcttatgagaaaacatgcttaaacaggaaaggtagagcatattgctcagtatcggactatttaccccggattcattgaagctatcaaaaatcgccgtcaccagcggcatggggggactctggttaattaacaaacggtctttgctgtgtaaccctaaattgcgtggtagctgacgaatattttgtaagtaatggcaaactgtcagctcatcgatatccagtcgtcgcgtatccggactacaaaacgcaaaatcgtctgccaaatttttctccagcagcagaatactctcgttatgcaggcttattttttgctgttcatgataaatatcgaaactacgacgaatgaggatcacgctgcagacatgagtcatgattatcccttatatttcatactgcgattatttcaatttcagtatactaatgaaatgatgccagactgtttcttagcgcaaaaactgccagatttggtaggaccaaaatttatccacaaagtagttttgcataacagttaattgataataagtaaatgcagcacgaatatattttcgcacagcgtatagcttatgtttataaaaaaatggctgatcttatttccagtaaaagttatatttaacttactgagagcacaaagtttcccgtgccaacagggagtgttataacggtttattagtctggagacggcagactatcctcttcccggtcccctatgccgggttttttttatgtctgagtaaaactttataatcttattccttccgcagaacggtcagtgccgtaaaaattcccttgcgcaacaatacttgccgcgctgtcacggttgctcaatctctgcgcgcttcgctcctgatactctgtgggcgtcatcccataataatttcgaaagacgtaaatgaaatagctcacgctgtgatatccacaggatactgcaactcgcttaatactaaaaccatgtataacaataagttgcaaagcacgttgcattctacactcagtaagcaactgactataacttgtctcttcttcgcgcaattttttctttaacagacttggactcatcaacagctcgctggcgattcgggctagtgtccactcatgggcgatattattattgataaccgtacaaactcgtgttcgcatgttcggttgtaaaacgttcagaagcagcggtataaagtgctcatcctcaagaaaaacagataacaacgcaaagattaatgctcttttacgtagcatttctgcatagcgaagattcttattctggcttagttgcgcaacttcctgaaaaacaggaatatctctactacagtgatgaacgagtaaactagaaacttttttatgtgcatgaagatttaatgcctcctccttgagcatcgggagaaataaactaagcgtgtccctactcacgaatacaaaattttcaacacacttatctactcgaatttggcttgcatccgcaaaaaccaggtcaccgccattaaaatagcgatattcaccattaaccatggtgagaatatatttatgtcttgcatacgcaattagacaattcccatgtagactttgcatagttgacttaatattacataaacatattactgtttattaatgtagcacgccgccctcttaagtcaaattgattgataaataaatttaaacgaagcgggagaacaggatgataatgtgtgatgttctacgggcaggatgactggatttataatacaaaaacgtgtttaagaacacagggaaattaatagtaagcaaataatcccttttcgtgacattaaaggtaatcgctacatttaataaacattcatataacatatatcttatcaacacgatgaatagacagccaatatattattgcgattaataagcaaccgaatgcccagctgtttttttaaaggctgggcattcggtttttacaacgttatgttatcaggtgtgtttaaagctgttctgctgggcaataccctgcagtttcgggtgatcgctgagatatttcagggaggctttgtagtcttccagcaacagttcagcaaagtccatttcgaagccgcgacgacacataatgcgcatcaccacgatgtcggtggcttcaccgccgagagtgaaggccggaacctgccagccgcgcagacgcagacgttcagagaggtcgtacagggtgtatcccggatcttcaccatctttcagtttgaagcaaaccgccgggatgccttcgtccgggcgacccgtacagatgaactcatacggccccagtttggcgatttcatccgccagataagcggcaacctggtaagaggcgttctgtactttggtatagccttcacgaccgaggcgcaggaattcatagtactgtgcaattacctgacccgccgggcgggagaagttgatggcaaaagtaccaatttgaccacccaggtagtcaacgttgaacaccagttcctgcggcagcgcttcttcgtcacgccagataacccagccgcagcccagcggagccagaccgaatttatggccactagcactgatgcttttcacacgcggcaggcggaagtcccagacgatatccggggcgacgaacggtgccaggaagccaccgctggcagcgtcgatgtgcatgtcgatgtcgataccggtgtcggcctggaatttatccagcgcatcgtgcagcggttgtgggaactcatagttaccggtgtaggtcacgccgaaagtcggcaccacgccgatggtgttttcgtcacaggcttcaatcatgcgtttcgggtccataaacaactgaccggggcgcatagggatctcacgcagctccacatcccagtagcgggcgaatttatgccagcagatttgtaccggaccgcacaccaggtttggtttatccgttggtttgcctgcagcttccatacgcttgcgccaacgccatttcatcgccatcccgccgagcatacaggcctcggaagaaccaatggtgttggtgccaacggcctgaccatttttcggcgcaggcgcatgccacagatcggcaaccatatttacgcaacgcaggtcgatggctgcggattgcggatattcttctttgtcgatccagtttttattgatgctcaaatccatcaatttatggacgttttcgtcgtcccaggtctggcagaaagtggccaggttctgacgagcgttgccatcaagatataattcatcattgataatctgaaatgcgacatcatcgcgcatttcgtgcagcggaaatcgtttactctccgcgatagtagaaatggcctttgcgccaaaacgactatcgagtagttcactgcggaaatccgttaacagcttctggtccatttcgaactccttaaatttatttgaaggcaataaaaaagtaggatttatccgcaatggaagcaaggcattacaggcttaatttaaataacaaaatcctaagcagaaaaacgactttttataatataaacatttaacatgataatattaaaaacagactttattatcgtaataaaaatcgcccaaacattgctgttcgggcgatcaaattaattattgtttatcctgcatatacggcgtgtacaccccgttcagactgtgcaggaaagctacgatatcatccacatcctcctgcggcagctctttgcctacctgatagcgcagcatcagtttcaccgccccgtccagcgtcggcacgtcaccgcgatggaagtacggtgccgttaaagcaacgttacgtaaaccgggtactttctgacgcaatttatcacgctcttctttagtcacattcatacgaccaatatccgccgccgtaatttccccaaagttaaagtcttttttcagccccaacggttcaaaggaacgtccgccgagaataataccaccatgacaagttgcacatttattatctttaaataattgatagccttttttctgttgcgccgtcagcgcattttcatctccgcgcaaccatttatcaaatggggaatccggcgtaattaatgttttctcaaattcagcaatggcatcagtaatattttcgccactgaaaccttgcggatagacttcgaggaactgcgttttaagctgcggatctttttccagcttagcaataatttcgtcccaggatttgctcgccatttcaatcgggttcaacggcggtccaccagcctgatcctgcaatgttgccgcacgaccatcccagaactgctcaacgttaaatacactgttaaataccgtcggcgcgttaatcggcccaactgcgccaccaacaccaatgcttgtttttctgccatcgacgccccccgcattcaacgcatggcaatgagcgcaactaatggtgctatcagcgcttaaacggggatcgtgatacagcgcaaaacccaacgccactttttgcgcatcggtaggcagtttttgcgggatgggctgcaccggttcattgcgatgttccggagcagtatcattgctggcgtaatattccgcgcgctgttttgcaatccaggccagtatttccgcccgctcttcatcactcaccttacccgcccagtgtagcgcggtataacgcgttggtggcatagtttcatactgcatcacccattcaatcttattcaaatcgctttggctaacgggtttatcagccagcagtgccgcacgcacggcctcaaggttaaaagatttatatccaagcttaatgtcgtaatccatcaactgtttcgcgccaggaatataataataggcgggtaattctgcgctaggcgtgtggcaatagtcgcatcctttttcgcggagaaagcctaaaaccttattattttcactgacagcagatgcctgaacatcggcctgtttactgcgtttattatcgtggtaccacacataaccagataaccctaaatagcaaatcgcgacgccagccaggccgatcgcggtaatacgactgaccattttcattattcttccctcacggtggtgagttattgtgacccagaaaattttccagaatgctgcaaacgtctctgcgagacaaagccatcataaaaaacagggagatacgctttttgataggaatcaatcaattacatgaatataaactatcaataagatagcctgtgcctattacccagatcaggaatggcatatcatgattgcggcgagagcaggattgaatgttctgaaaatgaaaaacaacaccaaatcggtatttttataaattccattgatattagtgcgttatattttttgacaggttaataaacgtgatccaccgcacgctttgtcgcccaccaggcggagcgaatgactacccttaaagaaaagccgataattagcgacgaatttcggaggttggatccttatgctcaatcagaaaattcaaaaccctaatccagacgaactgatgatcgaagtcgatctctgctatgagctggacccgtatgaattaaaactggatgagatgatcgaggcagaaccggaacccgagatgattgaagggctgcctgcctctgatgcgctgacgcctgccgatcgctatctcgaactgttcgagcatgttcagagcgcgaaaattttccccgacagtaaaacctttcccgactgcgcacctaaaatggacccgctggatatcttaatccgctaccgtaaagtgcgccgtcatcgtgattttgacttgcgcaagtttgttgaaaaccacttctggctgccggaggtctactccagcgagtatgtaagcgacccgcaaaattccctgaaagagcatatcgaccagctgtggccggtgctaacccgcgaaccacaggatcacattccgtggtcttctctgctggcgctgccgcagagttatattgtcccgggcggccgttttagcgaaacctactattgggattcctatttcaccatgctggggctggcggaaagtggtcgggaagatttgctgaaatgcatggccgataacttcgcctggatgatcgaaaactacggtcacatccccaacggcaaccgcacctattatttgagccgcagccaaccaccggtttttgcgctgatggtggagttgtttgaagaagatggtgtacgcggtgcgcgccgctatctcgaccaccttaaaatggaatatgccttctggatggacggtgcagaaagcttaatccctaatcaggcctatcgccatgttgtgcggatgccggacggaagcctgctcaaccgttactgggacgatcgcgacacgccgcgtgacgaatcctggcttgaggacgttgaaaccgcgaaacattctggtcgcccgcccaacgaggtgtaccgcgatttacgcgcgggggcggcctccggttgggattactcttcccgttggctgcgtgatactggtcgtctggcgagcattcgtaccacccagttcatccccatcgatctgaatgccttcctgtttaaactggagagcgccatcgccaacatcagcgcgctgaaaggcgagaaagagacagaagcactgttccgccagaaagccagtgcccgtcgcgatgcggtaaaccgttacctctgggatgatgaaaacggcatctaccgcgattacgactggcgacgcgaacaactggcgctgttttccgctgccgccattgtgccactctatgtcggtatggcgaaccatgaacaggccgatcgtctggcaaacgccgtgcgcagtcggttactgacacctggcgggattctggcaagcgagtacgaaaccggtgaacagtgggataaacccaacggctgggcaccgttacaatggatggcgattcagggatttaaaatgtacggcgatgaccttctgggtgatgaaatcgcgcgaagctggctgaagacggtgaatcagttctatctggaacagcacaaactgatcgaaaaataccatattgccgatggtgttccccgcgaaggcggcggtggcgagtatccgttgcaggatgggtttggctggactaacggtgtggtacgccgtttaattggtttgtacggcgaaccataatatttttacagccagccgctaacttcctgctggctgtaaaattatcctcttcaggaggagatatttaacatcattgccgcctgggtgcgatttttcacttccagacggcgatacagggattccagatgcgcttttaccgttccggtactgatattcagcgctctgccgatctccttattactttcgcccgccgctaacatggttaaaatctcccgctggcgggcgcttaagcttttgagatctttaatgtccttttccggcgtcgtccgccagtctccaggcagaaacatcatccccatcgccgcactatttaccgccaacgcaaatgtctcgacggtactatcacgaggcacaatggccagcacattaaaatggataacttcctgtaaccaccgtttattgcaatccgtcgccgtaattaacaccttaacctcaggaaattgcaccacggttttttgcagcaaccagtagcaaaactcaccatcctgatcgccatcgagcataactaaggcttcagggtaactttccagcttttgccataactcgtctgcctgactggccccctgaatactcactcctggaatacgctgctgtaaactgattttcattccatgaataaatatactctgcctgtcaaacatgactatttgcataactgaatctccacctgaatacgttaaaaagacttaagtagtggaagggtattacccgcgagaaaaaataagaattcgccatttggcggtggccattctacagagatgacgtgtagaaaatagttaccgatataaatagttacagctaaacgcctgaaattacatgtcgagggcactatttaaaacaattttgaggatttccttatattggtggttagtacgcatgcaattaaaaatgaaattccgcgaccacaagccaaaataacaaacggcaaggagacaaaaataagcacaaatagccaacacgtcctctgttcactttaaagggaatcgctgaaaaatacgctctgtttaaggggattcacctttctcagaaagctattccgcccttttcctgctgagaaatcgccacattcggcatgacaacattgtgaaacccggcattagatgttagaaaaaacaataaacaatgcgatatgcgcgttactgtttcgctgtgaacaacaaagcgtcaaagaaatggataaaattcacgcaatgcagttgttcatcaaagtcgcggagctggaaagtttttcccgcgcagcggatttctttgctttgccaaagggaagtgttagccgccagatacaggcactggaacatcaacttggcacccagcttctccagcgcaccacgcgacgggtcaaactcacgccagaaggcatgacctattatcaacgagcaaaagatgtgttgagtaatctcagcgaactggacggtctgtttcaacaggatgccaccagtatcagcggtaaattacgcatcgacatcccgccaggaatcgcgaaaagcctgttactgccgcgcctgagcgaatttctctatctgcatccgggaattgagctggaactgagtagccatgaccgtccggtagatattcttcatgatggttttgattgcgtgatacgcactggcgcgttaccggaagatggcgttatcgcccgtcccctcggcaaactgaccatggtcaactgtgccagtccgcactatctgacgcgctttggttatccgcaaagccccgatgatctgactagtcacgcaatagtgcgttatacaccgcacctgggtgtacatccgttaggttttgaggttgccagcgttaatggcgtccagtggtttaagtctggcggcatgttgacggtaaacagtagcgaaaactatctcaccgccggtcttgccggtctggggattattcagatcccgcgcattgccgtgcgcgaagccctgcgtgccgggcggcttattgaagtattacctggctaccgtgccgagccgctctcccttagcctggtttatccgcagcgtcgggagctttcccggcgtgtaaacctgtttatgcagtggctggctggcgtaatgaaagagtacctggactgaccgactatactttttaagaatgaccacgacagaaggacaaaagagcggatgacgcaggaaaacgagatcaaacgtcccatccaggatctggagcacgagccgattaagccgttggataatagcgagaaaggcagcaaagttagccaggcgctggaaaccgtcaccaccactgccgaaaaagtccaacgccaaccggttattgcgcacctgattcgcgcgacagaacgctttaacgatcggctgggtaaccagtttggtgcggctatcacctatttcagttttttgagcatgataccaattttgatggtgagctttgccgcagggggctttgtgctggcctcccatccgatgttgctacaggatatcttcgacaaaattctgcaaaacatcagcgatccgacgctagccgccacgttgaaaaacaccatcaacaccgccgttcagcagcgtacgactgtagggcttgtcggcctggcggtggcactttattccggcatcaactggatgggtaacctgcgtgaagcgattcgtgcccagagccgcgatgtctgggaacgcagcccgcaagatcaggagaagttctgggtaaaatatctgcgagattttattagcctgattggtttgttgattgcgctgattgtgacgcttagcatcaccagcgttgccggtagcgcgcagcaaatgattattagcgccctgcacctgaacagcattgagtggctgaaaccgacgtggcgattgattggcctggcgatttccatcttcgccaactatctgcttttcttctggatcttctggcggttgccgcgccaccgtccgcgcaaaaaagccctgattcgcggaacatttctggctgctattggttttgaagtgattaaaatcgtgatgacctacaccctgccaagcttgatgaaatccccctctggcgcagcatttggttccgtgctggggctgatggcatttttctacttcttcgcccgtttgacgctgttttgcgcggcgtggattgccaccgccgaatataaagacgacccgcgaatgccggggaaaacgcagccttaaaataggccggatgcggcgtaaacgccttatccggcatacgattttattcggcctggctccccgtaggccggataagatgcgccagcatcgcatccggctataatgcgcacataacctcttgaaactcgtccccagagcctcttcagccatctatttgggagcaaacaatttcattccaactcataaccccagcatataaatccagttggtaacttttatttaacctgaaaccagttttatccactatttataaaattatgtgaagcatttcatagaagaaaaatcactggcctaaacattatcccctttttgcctgatttttgaccatttccgcgatttgttacacattgaaatatcacttttgctgtgcgtaatatggctattcgttagccaaaaaataagaaaagattatgcaagcaacagccacaacactcgaccacgagcaagaatacacgccgatcaacagccgtaataaagtccttgtcgcctctctcattggcacagccattgagttcttcgacttttacatttacgccactgcggccgttattgtgtttccgcatatcttcttcccgcagggcgatcctacggcagcaacgctacagagcctcgccaccttcgccatcgccttcgtcgcgcgccccattggctctgccgtttttggtcattttggcgatcgcgttgggcgtaaagcgacgctggtcgccagcttgctaacgatggggattagcaccgtggtgattggtctgctgccgggctatgccacgattggtattttcgccccgctgctgctggcgctggctcgatttggtcagggtctgggcttaggcggtgaatggggcggcgcggcgctgctggcgactgaaaacgccccaccgcgcaaacgtgcactgtatggctcctttccgcagctgggcgcaccgattggcttcttctttgccaatggcactttcttgctgctttcctggctactgaccgacgagcagtttatgagctggggctggcgtgtgccatttatcttcagcgcggtgctggtcattatcggcctgtatgttcgcgtgagcctgcatgagagcccggtgtttgagaaagtcgctaaagcgaaaaaacaggtgaagatcccgctgggtacgctgctgaccaaacatgttcgcgtaaccgtactgggtacgttcattatgctggcaacctatacgctgttttacatcatgacggtctactctatgacctttagtaccgccgccgcgccagttgggcttggcctgccgcgtaacgaagtgttgtggatgttgatgatggcagttattggttttggcgtgatggtgccagtcgctggattactggctgatgcctttggtcgccgtaaaagcatggtaatcatcaccacgctgatcatcctgttcgcgctgttcgcctttaacccactgctcggttctggcaacccgattctggtttttgccttcctgctgctggggttaagtctgatgggtctgaccttcgggccaatgggtgcgctgttaccagagctgtttccgacagaagtgcgttacaccggagcaagcttctcttacaacgtagcgagcattctcggggcttccgttgcgccatatatcgcagcctggttgcagactaactacgggctaggtgcggtggggttatatctggcggcgatggctggcttgacgttaatcgccctgctgctgacccatgagacgcgacatcagagcttgtaataagagtgaaaagcctgatgcgctacgcttatcaggcctgaatttccatacaatatattgaattcgcaaggatttgtaggccggataaggcgttcacgccgcatccggcatgaacaaagcacactttgccaacaatctaaatctgtttaattgccggatgtcagacatccggcaattatcatcacttcttcatctggctcaaaatcgtccgacactgattagcctccccttcggaaggactgatcagtgccagtaacgccgccgccggtgttaccagcgttgccagtgccgcagcaacagcaccacgggcaatcagcggtccggctttcaccccagcctgcggatttttaaacgtcccccgcacatacagcgggctacgcagtgtgataatccgaattcctttactctccggatcaatagtcaaatccagctgttcgctagcaaaacttgccgtgccggtaacattaatcaacgcgttctcagtatcgaaagcaaaaatctgcgggcgcgccacgccgttggcaatattcagattcgccgccgcgcagttcacccgcacctcatcatcaccaaatatcgcaccgacaatgtagttgccgacattcagcccaacaatctccatcaggttgcggctcaccagcccgtcattcatcaacagtttcaggttgccgttactgttgcctaaaagtgccgccacgctgttaccgctaccgcgtagttccgcgtcaccgttcatttcccccagcgtcttctgcatcagttccacatcgggcatcagttctttcagtttcagtcgacgagcctgaatatctgcccgcccctgcatcggctttttatcgccttccagatgaatattcgccgcaatgctgccgcccgccatgccaaatttcagcggttgcaggcgcaggtcagcatttttgaggatgatatgagtagaaagatcgctaatcggcaggctactgccatgctcaatgcgccgccctttgaagcgaacatcggcatccataacgtcccatttatcggtttcgaagcggtcataaggcagcactttgcccgcaggctgaacgcttttttcgcccttcttctgttcagaccgtttgctcttttctgcccctttcccggaatcaacgccaatcaacggtcccaggtccgccagccgcaattgccggctctcgacatcaccttccagttttggtcgtggctttccggtggtgtagaccagagaaccgtggatatcgctatcaccaattcgcccattaaaaccgcgataatcaaagacgctgcttttttcagtgtcgattttcgctaccagccgaccatccgtttcaaacggcggggtatcgggcagcagaacgcccgtcagttcatagagatcacccagactatcgccagaaaatttaagccgtaaatcgacaccgcccatcttcattgggtcattcacgacgccatcaaaagcaacacgggtgttaccagagcggaaatcagcctgtaccggaaacggcgtcccttcgccacgcagcgccagcataccgcctatttttcccgtacccgtgagcggttcaccgttatatcgtccctgcgccttcaggccaaaaacgtaatcgcccaccttttctttatccgctttacctttgcttccagtaacttcgctgaacggcagcggcttgcctaagggatcaacaaaaatctccagatccgctttgcttactttgtcatcaatggcgatccgcccttgatcgaaaagaatattatccagccgaaagctccatgcgctcggctttgcattcgcgtctttgttatcatcgttggcaagattaaacgtccagttattgttcttttcagagaggcgaatcaggcgcgcgtcgggcttttcgagcttgatccacggcagccagaccgttttggtcagcagcgccagcggggccagcgttgcctctacgcgtggcaaatgcaccatcgtgacttcgggaatatccggtggattgccaagaatgatgtcttccgcgtgtacatggggccacggcacccagctgcgccagccagtttcttgtttttgccgctcccacaccacgcccagatcgccacggatagcgaacggacgattcaactccgcagagactttctggttgatagtcggtttgagtcgattccagtcaaaagttgcaatcaaaatgatcgccacgacaatcaacaacaagaaagccccactaatcgcagcggttattttgcctgccttgctcatcgttcgcttcctcatattcttcctgtgccagtcctaaagatagtccagccaggcggaaaatgaggcagcttatagcgccagaaccgccgtattcagcgtttctatcggtgccgggcgactaagaaaccagccttgtgcggcgaatgcggggctgttctgaacatcacgccactcttccggcgtttctacgccctcgacaatcaccccgcgacaatagcgattcattagatgtaaaagctgagaaaagagtgtgcgtccttccgggctctgacgcagcatcacaaacagttctcgcgcgattttgatgtagtcataacgcacttcacttagcgcagagaaatttgccatcccggtaccaaaatcatccagccacagcgggccaaattcacacatgctggcaaaggtactatctttcggcagacggatatgctccaccagttcgaaacgcagccagggaagacgctcaatctggcgcaggatttttggttgctgacgcagggcgatgagcgtagggccatcaatattgacgcttgccagcaggccgtgctctataaagaagtcggctttttgcgccagcaaatcaatctgctctttcacaacctccatccgatggctgacggtgatttcagtaaaatagcgatccggcggcaggcgttggctagggttcaagggatgcgtgaccaccgttaatagctccacggccattaaccgcccgcatgtttgatagatcggctgccaggtgtaagcacgctcacactgcaaccaaaaacgccgttcctgcaagctctcgatgcttgcttcagggttgcttattcgctggataacctgccttatcatcaaagatgtcctgtgtttaaaagtgatgctgcccggactcgacaaagattatcggcgcgtaagggcagaactttaccgcctggccggggtaaatttcctcactccacaacggaatctttcaggaatacgttctggctcaaaaaaataatggaacactgttttaatatggttgaccagcaaaccaccacagcgcaaactaacgctaattttttacagatcaggttcacgactatgtccaaaaagattgccgtgattggcgaatgcatgattgagctttccgagaaaggcgcggacgttaagcgcggtttcggcggcgataccctgaacacttccgtctatatcgcccgtcaggtcgatcctgcggcattaaccgttcattacgtaacggcgctgggaacggacagttttagccagcagatgctggacgcctggcacggcgagaacgttgatacttccctgacccaacggatggaaaaccgtctgccgggcctttactacattgaaaccgacagcaccggcgagcgtacgttctactactggcggaacgaagccgccgccaaattctggctggagagtgagcagtctgcggcgatttgcgaagagctggcgaatttcgattatctctacctgagcgggattagcctggcgatcttaagcccgaccagccgcgaaaagctgctttccctgctgcgcgaatgccgcgccaacggcggaaaagtgattttcgacaataactatcgtccgcgcctgtgggccagcaaagaagagacacagcaggtgtaccaacaaatgctggaatgcacggatatcgccttcctgacgctggacgacgaagacgcgctgtggggtcaacagccggtggaagacgtcattgcgcgcacccataacgcgggcgtgaaagaagtggtggtgaaacgcggggcggattcttgcctggtgtccattgctggcgaagggttagtggatgttccggcggtgaaactgccgaaagaaaaagtgatcgataccaccgcagctggcgactctttcagtgccggttatctggcggtacgtctgacaggcggcagcgcggaagccgcggcgaaacgtgggcacctgaccgcaagtaccgttattcagtatcgcggcgcgattatcccgcgtgaggcgatgccagcgtaaacgcagcatatgcaaaaggctggataaagtgttacccctctatccagctcatccataaatacctgatggttgtgctaactcatcaccatcaggcattactgtgcaggtggaatatccgtcacttcaggatgtacgtcatccgtggcgacagaggtggtcgcagcggcggtagatggggccatgatttgatcccagaccgcctgcaacgctttcatgttaaattccggctcgcctttcggctgcagcagtattaacgccatatcattgctcaactgttgacgcagatcctgatttaacatctctaccgtcaggctattaaggaaatcctgccgcagtttctgatattgctccggcgcgatatcgacaacctgattttgcaagctacgcatccgctgacccatcagaatatcggtatcagctcgtgcataggcggcaaacagtttctgcagctccagtttcttttgcgccactaacgcattgaactcttcttccggcagacctttatcgcgaaccttcgccagttcacgcgccaccagattaaggttgctgttcagcttgtcgtttggactttcgatgttgatggcacactgcgcacgcagatacagcacacggcagtcaaatccaagaccgatgtctttgctgttactggcacttaacgcttgctgaacatgccagaacagcgcctcgcgggccaggtccgcacgccagtagcgcagcagtgcggcactttcacgaatcggctgccacggcgtatcccacatgatagataaccggtcctgacgcaccgcgtcagtcataatactcaccgcttccgcacgcagcggagaaagcgtcggcaccggagctggcgtttcacgtttgcctttcagttcgccaaacgttttgtttatttggtcgacaacgctgcgcgcatccacgtttcccaccaccagtagcgtcattgcatccggggtgtaccatttctgatagaaatctttaattttttccgcttcaacgggttgtttcagcggatcggcaggatcgtgacctaacaaggtactccctttcagacgatagcgccaccagccctctttagtatcggcaggccaggttgccaccatgtcctgactttgcagcgcgtggttgatggtttctggtgtgatggtcaatttgccagtggcatttgccagataagagagcgcttctttcagcaaatcgttacggttattgggcaaactcagattaaacagcgtggtgtcataagagacaattaccggcggcatcgggcgtttagggtcgatcccctgctgccacaaactacgcgcctgtgctgcgtcaaggccaccgctttgcgttagcgcaatacgagggatggcgtgactgtaaccgctctgttgtgtactttcggcgaggctaccggtattaaccagcaggcgaatttcaacacgatcgctgggacgctggggggtggtcagcacttgccactgtaaaccgttggaaagcgtcccctgttgccatgctggatcaggctggagcgcatctgcctgcacatagccagcagtggccatcatcagcaaaccgcccgctaaaagtcgaatttttgtgccctgcatgtgaacccctgatcaactatcctggtaataaaaaaactgcccgttgtcggtcagtctaaatgacgttaaaaacacttcgtgttagaccgcaagaacatgaaaatgtcacggaagaagtgaaataaacctgaactcacccaggtggtaagttcaggcacaggggtcaattatgcgcaaacacccgcactcggggaagggagtgcgggcataagtgatgagattaagaggataattcgtgcgttttgccatccggcgcacgattattcagcacatcgtccagttttttgtggtccagttctttcacccacttagcaacgacaatggtcgctacgccgttaccgaccaggttagtcagcgcacgagcttcactcataaagcggtcgataccgaggatcagcgccagacccgctaccggcaaatggcccaccgcagagagcgtcgccgccagcacgataaagccactacccgttacccctgccgcccctttagaagaaagcagcaacacgattaacagcgtgatttggtggacgatatccatctgactgttagtggcctgggcgataaacaccgccgccattgtcaggtatatgcttgtgccatcaaggttaaagctgtagcctgtcgggatgaccagccccaccacgcttttacggcagccgagtttctccatcttgtcgagcatacgcggcagcgcgctctcggaagaactagtccccagtacaatcagcagttcttcacggatgtagcggataaatttgaagatactgaaaccagtcgctttagcgatactacccaataccagcaccacaaacaggatacaggtaatgtagaaacagataatcagctgccccagttgcaccagtgtgccgacgccgtatttaccgatggtaaacgccattgccccgaacgcaccaataggtgccagacgcatgatcatattgatgatgccgaagatgacctggctgaaactttcgatgacgttaaaaatcagttggcctttgctgcccagacggtggagcgcaaaaccaaacagtacggcaaacagcagcacctgcagaatgttaccgctggcaaatgcgccaatgacgctcgccgggatgacatccataatgaaggcgacaatgccctggtctttcgcctgatcggcgtaaaccgctaccgctttcgcatcaagcgttgccggatcgacgttcattccggcaccaggctgcacgacgttaacgatgataagaccaataatcagcgcgatggtactgacaatttcaaagtaaagcagtgcgactgcgccggtacgaccgaccgccttcatgctttccatgcccgcaatgcccgttacgacggtacaaaagatgacaggagcgatgatcatcttaatgagcttaacgaagccgtcgccaagcggtttcatttgctcgcctatttcaggatagaaatggccaaggagaataccaatggctatcgctgtcaggacctgaaagtaaaggcttttaaacagagaggttttcatagggtgtcctttagtaaaaccacaggtcttgtaaggttatggggtacctgcggccttaaaataacacccagacaacatcacagaaatgtacctggatcataattgaaacaaaaaggttaaaaagtttgagctggctcgcacaaaccagcactttttaaagttttgtaatcagtttggggtagttacttttcttccaggtaactctcttcgaagatttcaatagggagtgggcgagcaaaaaggaagccctgggcaataccaacgcccgcttttgccagccagtcgcgttgtgcttcagtctccacgccttcggcaatcatttgtaagttcaggctctgcgccagcatgataattgcagcaatcatgctgctatctcccggcaagccttcaacaaacattttgtcgattttcagtacgtcgattggcaagcttttcatatgctgcagctgacgcagccctgcgtagcccatgccgaaatcatccagcgccacccgaactccggcattgcgcagcggacggaggattgccaccgcagcatgagggtcgtcaatacgtcggctttctgtcacttccagaatcagtgttcccggctgaatgcgatagcgggttaacagttccagcatatccgccaccatattcgggtgcatcagttgcagcgcagagaggtttacgctcaagggcagcataatgccgcgctcttgccaggctgcaagcaatcgacaggactcttccagcacccagtgaccgacggtaaccatcagcccacagcactcaatgcgatcgattaagccatccggcaggtcccaactgccatccggttgctggatacgcagtaacacttccgcactgaccagtttaccgctggtcatctcgacctgtggctgtaaccaaatagcaaactgatgattttccagtgcattaaggatatcgctctcttccgtcaaccgcttctgggcggcttccatctgctgcggatcaaagaactgaatctgattcttgcctttatggcgagcggtaaatgccgcagaaatagcgcgactgtaaagctgttcggcggtgagatcgccgtagaacatcgccacgccaatgctacagtgcggacggagttgaatacgttcaatcggcaggcgctcgctcatgatagtgagcacttgctgacctaaggtgattgcgtgccacggttcctgtacaccgttggcaatgacagcaaagtcataaccgctaatctgcgcgaggatcatacgtgggctcagtacgcttttgagtttttccaccagcgtcagcagcagaatttctcgttgcgcctctttcagcacgcccgcagtatcacgcagggtttcacaggtgatgatcatcagcgcggtggtttgtttacgcgcgacaacctgctccagcatctccatcagcaaggctttgttcggcaaatcgctcaccgggaagcgcatcgcattttcgttctgttcttcataatggcgctgcagcaattgctggttgaggttgtaactgcgcaccaacataccgatttcatcgtcctgatgcagacgcggtaatgccagttggtgaccaacaagctccttggctgggatggcgttaagttcgcgagcaatattgcgtaacggatgcaaaatcaggcggttaatgcaccagctgatggcgacggtcaggataaggctcaaaagtaagtaaatggtcactaacgtactgagggtgctcatcacgaacttatacatacggaaggaatccgcctgtagtaccagataggcaattggctgcgggtttgccggacgttcgaggctgtaaacgcccaggctgatttgaaccggtagctcaaacaggcgagtaaccattaccggcaccgggcgctctggaataaaacttttacgcagcgcctggaactggttaggcagcactacatcggcacggctgaccacgcctgccggtttaatgctggcaagaatagcttccgcttcgggaatatcgcctttcaaaatagcactagataagggttcgcggacagagcgagcaatgctttccagttgcgtagccgtgttatagcgattctgctggaccagatggaacagcaaaacggtgcaaaaaataaaaacgaacaccaggacaacggctgccaccattgccatctgcttgattgttaacgagcgacttacgcgcaaattgtctccccccggaaatcccagattgccgcccgagtatacccgatcgcagcggcattaagagaggcgctatctgaaaacttaccagtcggcgtaaggtatcagcggctgcggcggtaaatccatgtcaccctgccatccggcggcggaataacgtacgtagagcaggaaatggctgggtgcgtaatctttcgcctgctggatatcaattgccgtgccaacaaaccagttggaagtaacacgtcgttcaagtaatgcccgcgccgtgtagccgaagccctgactgctgccgccatcgttggattgccgcgcagcttcttcctgccagtcggtcgggatcagattcatcagcggataacgcggcatggttttggtgcgactatggctccagctgccagacgcacccagctcccagctccagttttccgtgcgctcccgccacatcaccggtatggcaaagctcaggtattcctgcggactgtagtaaccgccctgaccgagactgtagccactcagatctttgtcgtaatgccagatcatgttgttcaggccgattgtgacgcggcgattgttctggttaatgaccttatagtaatagcccgtcatccagcgcacgcgccagttatcttcgacatttttaccggttaactggtcgccactaaggcttgcccagacgccgtttgcttcacctttatcgtagctcagacttagccccacaccgtcggcacgtacgccaccccattttttcccggtattgctcggggagtctttttgcccaccaaaggccagcaaagaactggagatgggccgacggtgggcgttaacggtgtaacccagcggcccgatatcatcgctgtaactgatgccgccgaccacatccaccacgttgaagcccatcggcgtggtaccgatatcccagctccagacgtcatttcgccagccgaccgccacgctggcaccggaatcgctctggctgcggttgccgctacagtcctgtaatgtacaggtgccccagttgtcatcccatttgccatcggcattagtggagaaactgccgacgttcatattgacgaaatcactgcgaaagaacatccgcccgtcagaatacggcgcatccacctgcaacatggtagtgtgcgctttcagatcggagtaaccaccggtgccgctgctaccccagtaatcgtgctcaagggtgacgttaagatcctgctggcgatagaggtccgccgcatcgctgcgcacgccacgtttcagccagtcatctttctcgtcgttacgggtcagtcgggtaaaggtgtcgttatcctgcggacgcgtcgtagtcacaccggatgcgaccatggcgtctttgtaggtttccagcgcctgcgttggatcgcccgcctgcgcttcaaacttcgcaccatcacgcagcaccatcgcgctttccatgctcggtggctgagattttgcctgcgggatcaacttattaaacgtccgctgcgctgctgcggtatcgccaagctgcgcctgtgccagcgccacgcgccgctgtgtgttcaggctggcgttatcggtagcgggcagtttcgccagctggctacgtgccgccgctttgtcaccggcagcaatatccacttccgtcagaccaagaatggcgtcggcgttagctggctcccgcgtcaggacattctgatatgcagcgcgggcggcggtgtaatcacgtcgttgttgcgcccagtcagccagcgtgaggtcaatacgcgtggaaggtggttgctggcgcagcatcgcttccgcttctgcctctttgccgctttctcgcaggcggttagcggtttccagcacctgatcgctttgcagtcgattaaccagctcctgaatattgctgttccactgcgcacgcggcaggctattgatatgcgccagcgccgctctgtcctggtcatgaccagagaggtacagcccgtaagcgtaaacctgctccgggtcgttgctcttctgctgcgccagattgcgcattaacgtatcggcctggctgcgttgtccggcctgccagagatcctggctaagtcggtaagtaatccatacgctgccggggtccagcgccagtcgttgccgctgaagtgctgccgcctgcgcccatttgccctggttttccagtgcctctgcctgctgtgccagacggtcgttttgcaggctgcgttcgatatcatcaatgctacgccgctgactggcagagaggctggcgataaacgcttcagctttttctgggctttgctggcggtaaatatttgccagcccgcgcacggcgttagtgttgccgctgtccatacgcaaggtctgctgataataacgttcggcggcgggataatcttttcgcgccatcgccacatcgcccagccccagcactgcataactgtcggtgttatcgacattacgcgcctgctggaacaggcgttctgcccggtcaggattattggctttcagcgcagcatcgccctgctggatcgccagccagtagcggtttactttcagcagactgttccatttgtcgttgttgctgctgtgcgggtccagtgcgagggctttttccagattcgccactgcattggcgcgatcgcctttctgagaatacgcctggcccagcgcccccagagcttcactgtctttcgggttcgcccgcaccgcctgttgtagttcgggaatggctttacccgccataccagagtccaccgccgctaaaccttgcgcacgagcgcggaaagcaggatcggccagctgtttttgctgttctgccagttggctttgcgcagccgccacgctatcgccatcactaaagatgctgagatattttttcagcgcgctcacactggcatcactgacgggcatgtctttaatctgcccgtaccagattttagaggccccttcgcgcccggcgttgctttttgccatctgttccaggacggcaaaaccttcgtcacggcgatcgctactaaacagcaatagcgccagattgttttgcaggcccgtattgcccggtgcatccgcattgatgcgttttaactgattaatcgcttcgccacggcgagccggaattttcgccaccgtactccagtactcgacagcaatgtcaccttccggcggcgcaccgttgaacagtttgttgtaactcgccacagcttcttctgcatgaccggtcgtcgcctgcaatcgtgcctgttgcagtgcctgacgaccatccggcgtggaaagtagcatcgtagtccggctgcttttatacgcattactactcggcgctaactggctcagccgatcgagctgtttttgcgcgccatcaatatcgccctgacgtaacaaagaacggaaacgggcggcaacgacgtccgggttattcggatcaataagttccagccgatataagctctgttgcaccagatcttcacgatgggtcgcttcgcctaaccgaacttgctccagcaactgttgctgagcggttggtgctgcctcgaccatcggcatgacggccagaccgagggaaagcgtgaatatgtttagtgtgaatttgcgcattcctggccccagtcaggtaattactttagtgactatttgcgcattcctggccccagtcaggtaataactcaccttttgtgctgaagcggaaacggtgttgatcccagccttgtccaaacagggtcagcacatagttgtaataggcatcgctgccgggaaagttatcggccacgcgctggcgctgaacggcctgcgcatcgcggttttgtaaaaagggcagcatggcggcagaaaaaccgactggtcctttaccctgcgctttccccgtagccacatccactttttccggcggataaccgtttttctcagtgaatgtcgccatcggtttaaaccggttgagcatccgcgctttttgcggatcgctgtcaggcatcatgcctacccacatgtaaacgcggatagcgtcgtagctgctgatcaatgttttttcggcttttagctgccagcctttgtctttctcatagcgcacccagtctgggctaaaacctttcggggcggtttccagcaataaacgttgattggtttcgcgcagcgtggtccacggcgcgccaaagcgggtgaaatactgcgccagcgtcggcggcaggtagctggggttaaaacgccagctgttatcctcagcaaaacccactttgcccggtaacaacatggaacccagcccaggcaccgtcaccacttcctcccgcgcgatacgttttagcaacgcgctgccgatgtcggtataacgctgctctttccacaaacgccccgcctccagcaagctccaggccatccagacatcaccatcggaggcgctattgctgtccagcacttcccacttactgttctctttcttgccccacagccaggcgggcaaacgttcttttaaagaaccctgagcgagattgttctgcgtccagtcgagaatattatcgaaagctgcacggtcgttagccgccagggcagagaacatgccgtaactttgcccttcggaggtggtgattttgcgcgcgtcgctggggtcgatgacgcgcccttcctgactgatgtaatcctttttaaactgctcccaggcaggccaggtacaggctgcctgaacactaaaggcagccagcagcagcatcgtcacgattccactacgcaacacattcatcttcaattactcgttatccgggttaagacgacgacgactaataattcgcagcagacgccacagtacccatgccagcaatatcacactgatagccgccagcaccgccagcagaatcggatggtttgccagcgcataccacacgcgctcgaaccacggcagatgacctacgtaataaacgtcgccaacacgtaggctgttgataccggactcgcggatcaccgcgacgctaccgaacatggtggcgcgtttgccgctatcgttcaccgcatcgttaagcatttcataaccgcgtgggctatctgccaacagcgcaatcacgctgcgctggtcgttatacgggctctggaagccaatcaccgccgccatcgcaccggaagaggtcagcgtactccgggtttctgccgcgcgatcgctctcgtccggcacaatgccggggaacggggtctggcgcatcggtgttttcacccagctttcggtcgcctgcaccaataggtcgatctgcttatcgtctttcagtttgtccgggataccaccgatgatcatgatgtcggcatctttgccctgaatggtgctgccatcatcggtcaccgtcagattaatcgccgggaagcccgtctgtgcgccgataaaaccaacagtattcagcaacgtttccatctgtgcttcgttaggcgctttcggcatcacggtgatggtttggctcagatccgccatccggctgaatgggaagcccgcgttagcaaaggcgcgtagatccggcatcgggatgaagtggtaatacttgctgaagtcgatggtggagtcgtcaccaatcaccacatgattctgcaccggctggaaggtaatacagttatccacgctaccgcccggcatcgggttcatatactcaaagtcgaagcgcagctggttggtcgcgcccagtttcagcgccggaatagagacatctgttttgccatccagcaaaccttgtaataccggaatccgcagcagcaggcggttcgcctcctgtttgctgctcaggttgaaggattgcaggaactggttattcaggctgatatccatccggctactgtctttcaccggcggcatggtgtagcggtaattaatatccatatcaatgccggtactgcgcatcaggtagagatccggcggcaggtttaggctaacgttaatcgctgctggctcaagaccgctggattgtaactgttcttcataggttttcagttcgccaaatgtgaccggacgatcggtacgtacccagttcggcgcatcgtacggcttacgcggtagcagcggtttcacttcattcactaccacgctttcaccacggaacagaatgttaccctgagcgatacctttcgctgcctgcaacaggtctttgtcgtcacgaccaaacaccaccagcagtttgacgtaaggattctgcggatggttaatcatctcaatcaccggggcttttaccgccggatgatcgcgcaggaagtccggccgtttgtcgttggttgcaaagacaatggcattgcgatccggcagttggttatagagtaccgggaagttctgcccacgccagccagaacggctaccaaaccagctggcgacaatggcagaggcttgttgcagcccaacatccggcgcacccgcaaagaccatcggcaaggtgttggtgcggttatcgctcgggtcaaagaatggcaccgggaagtgactcaggtcattcttcacattcagggtctgataggtcagatccagtccactgctccgcccaacatccagccaaagcgtggtgctggccggtttttcgcacacgtcctgataatggccgacaaactccagccgtacacggttgaagtcgctaataaacagtgggttaatgggcatttgcgccagcgtttttttacccaactgttctttggtcactggcagcacgcccatcagttcatcattgagataaacctttaactggctctggacaggcagtaagcttgggcttggggtgtattcgaagttgagcatcgccttcgtcaccacttcatcgctgcgcataccaaactcaatgctgccgttcgggttaatgccacgtagcaccatgctgcccggcggcggtgcaatttgcgcaaaggtcagcttcacatcacggctaggaccgttctgcgccacgactggcgcatcagcgccctgcacgcccggcatcacttgccccacctgcggattttgttccgtctgggcggctacagctggctcagcattgatcagtggttgcgttgctggcgtcgcctgcgtcatgaaagaggggaacgcactcatccccatagccactgcacaaatccagaatagttttcttttcatcgcgttatcatcattgttgagccaaagcctgatcgcttggttgtgccgtttcgctccgctccgggcggcgcggaataaagcttacaacccaggaaaccagagaagtcagcacacggaatatgcccttcacgctagaaggcgcaaactccgccagatggcggtagccacggaagccgagcttcagaatatccagcagactttccagcggcttatcttccgggtagctgtcctgccagagcgcccatgtatccgcacgggcaaacgtacactgcacaaaatcgatatgttgctgggtggtgagcggcattaatttcagcccaacttcattacccatcacgcgcgccacctgggtcgggaagacgtattcctgctgaccgcgtttaagcaacagattcactttctgcccttccagaatctgcgcctgaccgttgatcttgatccccaaaccaccgtcggagaaatcctgaacggtacagctgaagaggtgaccatcttcgcgggcaattgccgcgggcatcgtcatctccacgcggtggcttcggcgtacctgtttgctttctacgcttaccgcaactgcgccgccaagaacaatcaggttgtagaacacccacaccatactgacgaccacggtgagcatctcggttggcgggccatagaagtagcgccagatgcctaccgcaacgcccaccaggttgagcaggacaaggaagatgtagggccggctgatcacccagtcgacgtactcttcttccaccagtccacctttggcggtgacgttaaatttgcctttgtgcgggttaatcagcgccaccagcgtcggtggtgcgatataccacgccagcaccgtttcgtagatttcactccagaaagagtggcgatatttgccctggatcttggagttggtcaggctggcatggatcatatgcggcagcacgaatagggcgatcatcaacgctggcgcatagatgatgtaggcatgaagcagcaggaacgccagcggcgcagtcaggaagatcagccgtggaatgccgctcaagaagtggaacatggcgttgacgtaacatagccgctgagcaaacttcagccctttaccggtgagcgggttatcgagacggaagatttgtaccatcccgcgcgcccagcgaatacgctgaccgatatgcgcgctcagactttcggtcgccagccccgccgcctgcggaatacgcatatacgcggaggtatagccacgacggtgcaaccgcagagaagtatgcgcatcttcagtcacggtttcgacagcaatgccgccaatttcatccagcggcttacgacgaatcaccgcacaggaaccgcagaagaaagtggcgtcccacatatcgttgccatcctgcaccagaccatagaacagcgtgccttcgttcggcgttttacggaaacgccccaggttgcgttcaaacgggtccggactgaagaagtggtgcggcgtctgcatcatcgccagctgtttttctttcaggaaccagcccatggtcatttgcaagaagcttcgcgttggtacgtggtcgcagtcgaaaatgctcacgaactcgcctttggcatatttcagcgcattgttgatgttgcctgctttcgcatgttcatgagtggtgcgggcgatatatttcacccccacgttttgcgcaaactggcgaaactcttccctgccgccgtcatcaaggatccagatattcagcttatctttcggccagtcgatacccaggctggcgtaaatggtatttttcaccacgttgagatcttcgttgtaagtcgggacaaagatatccacgctcggccacaggctcatatctttcggcaatggcaccggctgacgattcagcggccatactacctggaagtagccgagcaccagcacaatccacgcgtacgtttcagcgaagagcagaataagcccgcacaccaggctgaccggatcgtcccagttcagcgtagaggtgtaacgccaccagatataacggcaagaaacggtcaggctcagcacaatcaacattagcgcgctgaagcgccccggcatccgccgtacgatcagcgctaccccccacagcagcatcaggaagataaactgcgccagcgggttaaacggctgagtaacgcagattaacgccagaatcaggctgaaggtgacgatgataccgaggatcaaccgccgcgccccggcactcaaatgaccgagctcttttttctcatccagatgctgtgttttatggctaacgcgctcaggcagctcgttcatccattgatggtaacgtccacgaatattttgcagaccactaaatgcccgcctgcgcggtttcggcgtttctttgcggcttgcaccgatcaataaccagcatgtttgaatgagataacggaccgggtccagcggacgcggacggctggcgttgatatgcggatacaggtttttatgttctgcgcgaatacgctgccagcgcgggtgctccagcggaataaaaatccaggccaggatcatccagaaacagccgagcgtcgcgctgaaagcgctcgcaccgtgacgacgataatcgcgataacgcccgataagccgcgcgttgaccggcgggataagcaaccaccgggtcaggatactcatgatgcactcccgactggcgtttacatcaacttgcactcccgactggcgttttcagcccggagtagttcaacaggcaccagttcgccagcgtcagtatctcttcagccgccagcgcatcactgcgatattcacctactggttgcttagccgccaggcattcagccatcgcttcatcacgatgaatgagcatcggcagtaatcggcgctggctttgcaaccaaagctggtaaatatcgtcctgaacctgactgccaatacggaagtcattaatcaaaatatgtgcgccatccggcagcgcttgctgatgcagtcggatatggcagttggcatccacattgacgattgccaggctgtgatcgcacaaactcagcagctggtgggttatctggctggcatcacgcggtaagtcgattaaaatccactggtaacgcccgctggcttttagttgctgtaagccggagcaaatatcgctcagccgggtttgccagtgctgtggattttcttgttcttcaatggataactgaccaaaaggcagcaaatcgagctggctggtgtagcgcaacccagcgtcacgccagtcctggccatccagcatcgctctggcccagccctgacggtgggtaaaatcaacattaaaactcaggcgcaacaagttgtccgggcaggcatcgaccaccaggacattttctcccaacatttgtaaactccaggctaatgcggcggtgatggttgttgtccccacgcctccccgcaccccctgctatcccagtacggccattcaccaatcccttacttttgttgcgcaaactctgccagcaacggccagcgttttaatgccgcggccaactgttcgcgttgggaaatatcggcataatcaatatcaggcagactaaatgcctgctttaacgccacaatatcattctggaagatatagcctatcgcgggatcaggcagagtatctggttcattgttattcattttgcttgatccctatgaaataaccgtaccgttcatgagacaattctaaccgtgagcatttcgccggtttattgtttacggcgagacgggaatttgctcactttttgactttccgttacgcaacagaaaaagttaaaaacgaaaagactaaaatcacacgtcttgtgaccttctaaattgattcacatgctaaatctgataagttttaatttcaatggtaggtttatttcttagctttcgctagtaaactgataatcagacaaaatggtgacatgagggacattgtggaccctgtattctctatcggtatcagtagtttatgggatgagctgcgacatatgccagcaggcggcgtctggtggtttaacgtcgatcgccatgaagatgctatcagtctggcgaatcaaacaattgcatcccaggctgaaaccgcacacgtcgcggtcattagcatggacagcgatccggcgaaaatctttcaattagatgattctcaagggccggaaaaaataaaattatttagtatgctaaatcatgaaaaaggtctatactatttgacccgtgatttgcagtgttctattgatccccataattacctttttattcttgtttgcgcaaataacgcatggcaaaacattcctgccgagcggcttcgcagttggttggataaaatgaataaatggagcaggttaaaccattgtagccttttggtaattaatcccggaaataataacgataaacaatttagtttgttgcttgaggaataccgtagtctttttggtcttgccagtttgcgttttcagggtgaccaacatttgctggatattgccttctggtgcaacgaaaaaggggtcagcgcccgtcagcagcttagcgttcagcaacaaaatggtatctggacattagttcaaagcgaagaggcggagatccaaccacgcagcgacgaaaaacgcattctgagtaatgttgctgtactggaaggtgcgccgccgctaagcgaacactggcaactgttcaacaataacgaagtcctgttcaatgaagcccgtaccgctcaggcggcgacggtggtcttttctttacagcaaaatgcgcaaatcgagccactggcccgcagcattcataccctgcgtcgccagcgcggtagtgcgatgaaaatcctcgtgcgggaaaataccgctagcctgcgcgccaccgatgaacgtttgttattggcctgcggtgcaaatatggttattccgtggaatgcgccactctcccgttgtctgacgatgatcgaaagcgtgcaagggcagaagtttagtcgctatgtgccggaagatatcactaccttgctgagtatgacccagccgctcaaactgcgtggtttccagaagtgggatgtgttctgtaatgccgtcaacaacatgatgaataaccctctattacctgcccacggtaaaggcgttctggttgccctacgtccggtaccgggtatccgcgttgaacaagccctgacgctgtgtcgccctaaccgtaccggcgatatcatgaccattggcggtaatcggctggtgctgtttctcagtttctgtcggattaacgatctggataccgcgttgaatcatattttcccattgcctactggcgacattttcagtaaccgtatggtctggtttgaagatgatcaaatcagtgccgagctggtgcagatgcgcttgcttgccccagaacaatggggcatgccgctgcctttaacgcaaagttctaaaccggtcatcaatgccgagcacgatggtcgccactggcgacgaataccagaacccatgcgactgttagatgatgctgtggagcgcagtagttgatataagatgctgtggagcgctcatcatgatgaccatcagcgatatcattgaaattattgtcgtttgcgcactgatatttttcccgctgggctatctggcgcggcactctttgcgacgcattcgcgacaccttacgtttgttctttgctaaacctcgttatgttaaaccggccgggacgttacgccgcacggaaaaagccagggcaaccaaaaaatgactcaatttacgcaaaataccgccatgccttcttccctctggcaatactggcgcggcctttccggctggaacttctattttctggttaagttcggcctgttgtgggcgggatatcttaacttccatccgctcctcaatttggtgtttgccgcgtttctgctgatgccccttccgcgctacagcctgcatcgcttgcgccactggattgccctgccgatcggctttgctttgttctggcatgacacctggttgcctggcccggaaagcataatgagccagggtagccaggtggcggggttcagtaccgattatttaatcgaccttgtcacacgctttattaactggcagatgattggggccatttttgttttattagtggcctggttattcctgagtcaatggattcgcattaccgtttttgtggttgccatactgctatggctgaacgtacttaccctggcgggaccaagtttctccttgtggccagccggacaaccgacgaccactgtaacaacgacgggtggtaacgcagcggcaaccgttgcggcgacgggtggcgcaccggtagtgggtgatatgcccgcacaaactgcaccgccaacaacggcgaaccttaacgcctggctgaataatttctataacgcggaggcgaaacgtaaaagcaccttcccgtctagcctgcccgctgatgctcagccatttgaactactggtgattaacatctgtagcctttcctggagcgatatagaagccgccgggttgatgagccatccactgtggagccatttcgatattgagttcaagaactttaactccgccacctcctacagtggcccggcggcgatccgtttactgcgcgccagctgcgggcagactagccacactaatctgtatcaaccggcaaataacgactgctatctgtttgataaccttagcaaactgggctttacccagcacctgatgatgggacataacggccagttcggcggttttttgaaagaagttcgcgaaaatggcggcatgcagagcgaattgatggatcaaacaaatctgccggttattttgctgggctttgatggtagcccggtttatgacgataccgctgtgcttaaccgctggctggacgttaccgaaaaagataaaaacagccgtagtgccacgttctacaacacgcttccactgcatgacggcaaccattatccgggggtcagcaaaacagcggattacaaagcgcgggcgcagaaattctttgatgaactggacgccttctttactgaacttgagaaaagcggtcgtaaagtgatggtggtcgtggtgccggaacacggcggcgcgctgaagggcgacagaatgcaggtatctggcctacgtgatatccctagcccgtctatcaccgacgtccccgttggggtgaaattcttcggcatgaaggcaccgcatcagggggcaccgattgtcatcgaacaaccgagcagcttcctggctatctccgatctggtggttcgcgttctcgatggcaagattttcaccgaagacaatgttgactggaaaaaactcaccagtgggttgccacaaacagcaccggtctccgagaacagtaatgcagtagttattcaataccaggataaaccgtacgttcgcctgaacggcggcgactgggtgccttacccgcagtaagaacgaaaaaggccgcagagtttcccccctgcggcctggtccgggcgcaaattgccattacggcagcctgacgcccgcatgacacgttacttccgcttgttcagccagttcacgatcatactggcaagaatgccagcaatgaccggagccgctaaatcatgccagaaggccatgcccagctctgcgaacgtcatatagccgcctgtgttgtaatgacaacgtttcgcggctattcttgagtggtctagagtcaagattagcccccgtggtgttgtcaggtgcatacctgcaacgtgcgggggttttctctctccagcaaccaatgccaccagggataaagcccccgcaacattgcgcctcaccggaacctttccggcttgccgctgattctacgattgctttttactgtcagcacccggcaatcttcctcattgcgcgatgccttccagcttaatttctttatttgcaatagttgcagttcatatccgggctgactccagactggtagtgaaatgcgcaattttgtagaattgcgcctcctcgcgacctccccagtgaatctgttgcctcattttttacatactgcgtattcgacttctccacctgttgcgcaagagaaactgggtttattcatttttgcgaggccgacttctttctggacaggactttatgcagcacaacacactaagcaaacacaatcagaaattgccgtttacacgctacgacttcggctgggttttattatgcataggcatggcgattggtgccggaaccgtgctgatgccagtacaaattggcttgaagggaatttgggtatttattaccgcagcgatcattgcttatcctgccacctgggtagtgcaggacatttatttaaaaaccctttctgaaagcgattcctgtaatgactacaccgatattatcagtcattacctggggaagaactggggaattttcctcggggttatctactttttgatgattatccacgggatttttatctactctctctccgtggttttcgacagcgccagctacctgaaaaccttcggtttaaccgatgccgatcttagtcaatctctactttataaagtcgctattttcgccgtactggtggcgattgcgtctggtggtgaacgattactgtttaagatttccgggccaatggtggtggtcaaagtagggattattgtcgtgttcggttttgcgatgatcccgcactggaatttcgccaatataaccgccttcccgcaagcctccgtctttttccgcgatgtcttgcttaccattccattttgcttcttttctgcagtatttattcaggtacttaacccaatgaatattgcctatcgtaaacgggaagcggataaagtactggcaacccggctcgcgctgcgtacccaccgaattagttatatcacgctcatcgcggtgatcctgttttttgcctttagctttaccttcagtattagccacgaagaagccgtttctgcctttgaacaaaatatcagtgcactggcgctggccgcgcaggtgatccctgggcatatcattcatatcacctctacggtgcttaatatctttgccgtactgaccgcattctttggcatttatctcggtttccacgaggccattaaaggcattattctcaatctgttaagccgaattattgataccaagaaaattaacagtcgcgtgctgactctggcgatctgcgcttttatcgtcattacgttgacgatttgggttagctttcgtgtaagcgtgctggtgttctttcagttgggaagcccgttatatggtattgtgagctgcctcattccgtttttcctgatctataaagtcgcacaactggaaaaacttcgcggatttaaagcctggctgattctgctgtacggcattttgctatgcttgagcccactgttgaagctgattgagtaaaccggagcgcatggccccggttttgtgagttaacgctgcggattttcatcctgatcaacagcaaaacaagctaccagttgaccgccgtagtcttttagctgcggctgcaactgggtgcaggggccgaagcgccgacgacagcgggcgttgaaggcgcaacccggcggtggattcagtgggcttggtagttcaccgctgagcttgatgcgctcgcggcgatcgtccgggttcaggcgcggcgtcgcggaaagtagcgcctgagtgtacggatggcgcgggttattgaagatttggtctttcgttcccttctccacgcagcggcccaggtacatcaccatcacttcatcagcaatgtgctccaccacgctcaggtcgtgggagataaagacataagacagccccaactcctgctgcaaatccatcatcagattcagcacctgcgcgcgcacactaacatccagcgcggaaaccggttcatcggcaatcaccacatccgggtcgagcatcagaccacgggcgatggcgatacgctgacgctgaccgccggagaacatatgcggatagcggtcatagtgctcggttttcaggccgactttcgccatcatgctcagggctttttcccgacgctgttctttgcttaagctggtgttgatcagcagcggctcttcaagaatttgcccgacttttttacgcggattcaggctaccgtaagggttctggaagacgatctggattttctgccgacgcagcttctgcgcctgcggatcgtgcttaagcagatcctgcccctggtaatacagctcgccaccggtgggcatttcaatcatcgtcagcaaccgaccgagggtgcttttaccgcagccagattcgcccactactgccagcgttttgccacgttcaaggttaaagctaacgccatccagcgctttaaccagacgttccggcgcgaacatgcctttcttcaccggataatgttttttcaggtcgatagcctgcaacagcggttgttgcagggtggcctcttgcgtactcatagtgtcggcctcccggcatcatcaagtgggtaatggcatttggactgacgcccgtcagcgagcatattcagcgccggttcttcagcgcgacatctgtcagtggcataggggcagcgcgggttaagcaggcagccgttcgggcggtcgtacttgccgggaacgacacctggcaagctcgccagacgttctttgtcctgagcaaattctggcagcgcacgcagcaatgcctgagtatacgggtgacgcggcgcatggaagatggcgtgcgcatcaccggtttccaccacctggcctgcatacatcacgatgattttatgtgccgcttccgccaccagcgccaggtcatgggtaattaacaccagcgccatgttctctttctgctgtagctccagcagtagttcgatgatttgcgcctgaatggtcacgtccagcgcggtggtcggttcatcggcaatcagcagttttggccgacaggcaatcgccatggcgatcatcacgcgctggctcatgccgccggaaagctgatgcgggtaaacatccagacggcttgccggatcgggaataccgacctgattcagcaggtcaatcgctcgctgacggcgggtacttttgttgccgccctgatgcaccttaatcgcttccataatctggaaacccacggtgtagcacgggttaaggctggtcatcgggtcctggaagatcatcgccacttcggcacccaccaggttgcggcgctctttttcactgatacgctgcaaatcctggccgttaaactccagtttttctgccattacgcggcccggataatcaatcagccccataatcgccagactactgacgctcttaccggagccggactcacccacaatcccgaccacttcgccctgttttacgctgtagctgatgcggtctacggcgcggaacggcgcgctttcgtcgccgaaatgcacgcttaatttatctacatttaataacgccatctcgaacctcttactgcttcagtttgggatcgagcgcgtcacgcagaccgtcacccatcaggttaaatgccagcaccgtcagcaggatcgccagacccgggaaggtcacgacccaccaggcgctttgcgcgaactgcaacacgtcggagagcatggtgccccactcaggcgttggcggctgtgcccccatgccgaggaaaccaagagcagccatatcgagaatggcgttagagaaaccgaggctcgcctgaacaatcagcggcgcaaggcagttcgggaagatgttaataaacatctgacgcatcgccccggcacccgccacgcgagacgcggtgacgtaatcgcggttaacttccaccagcacggcggcgcgggttaagcgcacatagtgcggcaaggcaacgaaggtcagtgccagcgcggcgttaccaatgctcgggccgaaaattgccaccagcaccagcgccagcagcagacttggcagcgccagcatgatatcgaccacgcgcataatgatgttatcgaccaggccgccaaagtaaccggcgatcaggccgagaataacgcccataatcaggcttaacacaactaccagacagccaaccagcaggctcaggcgcgcaccgtacatcaggcggctcagcacatcacggcctacgtcatcggtgcccagcaagtgcgccatgctgccgccttcctgccaggctggcggggcgagcagtgcatcgcggaactgttccgccgggttatagggtgcaatccagttggcaaagatcgcgatgaacagcacgatgacgacgtaaaccagcccgacgaccgcgcctttgttgcgtttaaaatagtgccagaactcctgtaacggggtcatcggcaccggtgcgctaatcactttattttcagtaacctgactcatgatgtccccttacttcttatgacgaatacgcgggttcaccacgccgtacagcagatcgaccagcaagttgacgaggataatcatcgtcgccaccagcaatacgccgccctgcactaccggatagtcgcggcgttgcagtgcgtcaatcaaccagcgtcccagaccgggccagctgaagatggtttcggtcagaatcgcccccgccagcaatgttcccacctgcaggccgataacggtcaccaccggcagcatcgcgttacgcagcgcatggacgataatcacccgcatgcgggttagccctttggcgcgcgcggtgcggatgtaatcctcgcccagcacttccagcatgctggagcgtgtcatacgcacaatgaccgccagcggaatagtacccagcacaatggcaggcaagatcatatgggcgacggcatcgataaagttgccgtcttcaccccagatggcggtgtcgattagcataaaaccggttaacggattggagtcatcgaggaacaccatatcgctcacgcgaccggagacgggcgtcaggttccagtgcacgctaaccagcatgatcagcatcatgccccaccagaagataggcatactataacctgtcagcgccaggccaaccgctgtgtgatcgaaaatggaaccgcgtttaaccgcagccagcacgccgaccggaataccgactgccgtagcaaaaatcatcgcgcagacgccaagttccagcgtggcctggaagcgcggcacgaactcttcccaaaccgggatgcggcttttcatactaatgcctagatcgccatgcataacgccccaaatgtaatggagatactgctgccacatcggtttatctaagccgagttcagccagcagctgcgcgtgacgctctggggagatcccacgttcgcccgccatgatcatcaccggatcgcccgggatcatgtggacaaaggcaaatgtgagaagggtaataccgataaacgtggggatgacgagtcccaaacgtcggagaataaactgcaacataacccggattctctatagtgacccgcagcctggaactgcgtgtctgtattgctcacaaatcaattcccgcccttatcggacagggaatgaagtattgctgccggatggcgctgcacgcagaggcacagcgccaccgggtatacagattgttgacaaagtgcgctttgtttatgccggatgcggcgttaacgccttatccggcctacaaaatcgtgcaaattcaatacattgcagaattttcgtaggcctgataagcggagcgcatcaggcatttttgcctttgccatcagtcttgtatggcttttaattattcgatagagacgttttcgaagtgatgtttgcctaatggatcaaccacatagcctttaacttctttacgtaccggttcaaacacggtggagtgagcgatgatcagtgccggagcctgatcgtgcatcaccacctgcgcttgtttgtacagttcaacgcgtttattgtggtcgtcggtagcacgcgccggttgaatcagatcttcaaacggtttgtagcaccatttactgtagttggagccttgttcagaggcggcgcagctgaacagggtggcgaagaagttatccggatccccgttatcgccagtccagcccatcattaccgtctggtgctcgccatctttcgcacgcttgaggtactcaccccattcgtaggtgacaattttggcctgcacgccgactttcgcccagtctgcctgaatcatctccgccatgcggcgagcgttcgggttatacggacgttgtaccggcatcgcccacaggtcgatggagaaacctttttccagacccgcttctttcagcaaggctttcgctttttcaggatcgtaggtgtagtcctgaacgtcgtcgttatagccccacatggttggcgggatcaggtttttcgcacttacgcccgcgccctgataaaccgctttgatgatcgcgtctttgttcaccgcgtaggtcagagcctggcgaactttcacgtcatcgagtggttttttctgcacgttatagctgagataaccgacgttcagccccggcatttccatcagattgatggatttatcctgcttcatgcgagcgatatctgccgggttcgggtacggcatcacctggcattcattcttctgcaatttcgcgtaacgcacggaagcgtcaggggtaatagagaaaaccagcgtatcgatctgcggtttggtgccccagtagccatcaaacgctttgtagcggatacgggaatctttttgatactgctgtaactggaacggaccggttccgattgggttgaggtccagtttttccggtgtaccggctttcatcatcgcatcagcatattctttactcagaatagaggcgaagtccattgccaggtcagcgaggaacggcgcttccgggcgagtcagcacaaactgaacggtgttgtcgtccacctttttcacttcactgatcagctctggcaagcccatgccttcgaagtattcgtagctgccgccagaaactttatggtacgggttttgcgcgtttttctgacgatcgaagctgaacaccacatcatcggcgttcagttcacgcgtcggtttgaattctttattgtcgtgccacttcacacctttacgcagatggaaggtataggttttaccgtcttcgctgacttcccacttttcagcgaggcccgggatcacttcggtggtgccgattttaaattcaaccagacggttataaagcgggacggaagaggcgtcataggtggtgccggaggtaaacagctgcgggttaaacccttccggagatccttcactgcaataaaccagagttttagcctgaacacttgctgcgacggtcatagccaccaggctgagaccaagcttcagcatcccactctttttcaaggaaatacgcattattctgctccaattgtgatgtttgttgttttaaccctttgcagtgggttgtcgctgcctgaccttttttgttttttgcccggtcgggtcaacgttatgaggtggggatgccgtactaattaacatcagtgtaacagtgcggatcctccataaaatgcccctcgtgacctacaatctgtcaacagaatgtgaaaacgtcaatacagccaaccgggatttacaccaacggtgagaatccacacacaaagattaaaaaaacttcaaacagctatttgcagcagagaaatttgtgctactccaacatgaccagaacaatcagcttaatatttagcaacatttggtgattaagttttatgcatttaatgaaaaaaatctgaggaaaaggtggatatctgagcgattaataccatgaacgctaaaacgcacagcggaaaatgccagggccagccataagtaacgcaaaaaaagatttaagcaaatataaaaaaagacaatggtttctgtcacaaatccgttaatggatagtgagatatggggcgcaaatttggcagggaaatgtgtgtcgtgtaggtcgaataaggcggtcgcgccgcatccgacaatggccggcacatttgcctgatgcgacgctgacgcgtcttatcaggcctacgtcgagtcgaacctccctgcccccggaggttctcatcctcatgagctgcagatgcaaaaaagcctgctcgttgagcaggcttttcgaatttggtcggtgatagaggattactcgccacttcgtggctcgccctgcgggccgttgctggcgcaacgttctctcgcttcgctcgagtcgaacctccctgcccccggaggttctcatcctcatgagctgcagatgcaaaaaagcctgctcgttgagcaggcttttcgaatttggtcggtgatagaggattcgaacctccgaccccttcgtcccgaacgaagtgcgctaccaggctgcgccaatcaccgaatgcggggcgcatcttactgcgcagatacgccctcgtcaatcccttaatagcaaaatgccttttgatcggcgagaaagtcagcaggccgcttagttagccgctgcctcttttgcctgcgggatgtgacaccagttgttgttttcgttaattccaccatccggactagtatagccaagacaacccatgatggtatcgtacagctctacgtgacggcgtggcactttcatgtcggcttcttttttcagctgcgcaaacgcctgcgcattggccggattttccagatatttatcactcatccagaccatcatcggtacgcggaactgctccggcggtgccagttcacgcggcgtgccgtgcaggtgctcgcgttcattaatactctcaccgtggtcagctgcgtagaacacaatcgctttcttatcgcgaacctgatcaatcacgctggagataaagtgatccacataggtcacgctgttgtcataggagttgatcatctgcgctttggtacagccgctatcaacaccaatacattccggcttccactgcgcgaagctacgcggataacgctgggtgtagttaaaatggctacctttggtatgcagaatgatcagatgcttaccatccgggttgcgccctaggctttgctgcatttcgtctaccagcaacatatcatctaccggcttgccacgattacgtggctccgcaccaatctgctcacgataagcaatgttgtccgccatcgtgttgctgtagaaccacatttcgctctgcatagcgtagaggtcagaactgaatcctaactgcttcagaaccgcgaaaatgttctgttcttttaatgtgcgctgcggattatcttccgcgcccccctgacgtacaaacatgcaacgcagactgagtttggttgcggtatcacaggagtaaccacggaacgccgccagatttttctcctgggccagtttcggcgtggtattacgctcatagccgaaaatacccatatggtcccaacgcgtggtttcaccgatgataaacacgacataagtgtcatcaacgttttgcggtgcctgataagtgaatttcttcgccggattaagcaaactattattatcggaagattcatcgacccgcgcccaggcatacagccccaacgcagaaagccagttacttggcagataagagttcgctacgacaccgccataactcggcaaatcaacgccggtcgccctctccactttcttctgctggatatccagcaaacgaatcggtgcccaaaccataatacccgccagtacgacgaccgccaggctgcgaatacgctgccctggggttcgcagttgtcggagcaaggtgtagcgacagcggttattccagataaggataagaggcaatgcactaacggcgattaaccagagaataaagttcagaccaacaacttctttactcaggtcgatatcggtggtcatgacggaagcgatgatgccataaccaatgaccacattaaggaaggtcatgtaatagctggcacctgcggaaaagagcaccaccaggcttgccagaatacgccagctgcggcggccaaacaggctaagaagacgtagtaaaaagaaggtcaccagtacggtggcggccagttcaacaacagcagaaatgcctttccagacggtaaaatcgtgcgcatagctgccgaagcggcggtaaaaaaccgcgccattcataaaaaggccaatatagattgcaagcaaaaagctcagcttctgctgtgtaatgcttttgatgtatctcatgcaaacaaaccctggacaaacaggtgataacaccctgcttagtggcttttcaggcccggcagggaaaaagtgcggaggtagtcagataagtaaaatctacacgcgcgaataagtagaccacagcaaagggaaaaagtgtggggaaagagtgtgcatgaagcacaaatttacaaaaatgcaagtttgaaaagagactttagcgttacaaaaagcagtaaaaagggccagttaattggcccaaattttacgagtcattgtttatacatttcgttgatgcgtttgatgcacacggaagctgaagcccagtagctcgcggctgagcattaaagggagccatgcgcctcacgcaacattttctgctctggctgacgaatcgtcgtagaaagcgccaaactcagaatcagcagggcgaaaatcacgtagaaggtcacatagaagccgccaaacagactggcgataatgctaccacaaatgctaccgataccgaaaccgagataaatcacaccgtagtttttcgccaggttattgaggccaaagaactcactgaccagactcggaaagacggtaatagtgccgccaaagttaaatgccacgcaggcaatcgctgcaaagaacgtcactgcattcaatggtgcaaacagcagggccgccatacccaccaggcttatcacctgaccaatggtaataacacggatacgggcgattttgtcagacagaatacccagcaccagacgaccactaaggttggcgatggaaataacagtgactgcattggctgcggaaaccacatcaaggtgtgccagactttgggcgatatctttcgctaccccaatcacgtacaggccgctcatgcaggcggtcaggaacattaccgctaacatccagtactgcggtttacgcatgctctctgccagcgtgtaatctttctccaccacaccattgctggttttcacttcctgttttggtgcgtctttcattaacgttgcgccgaaaacaatcatcaacagcgcaatcgctccccaaatcacaaaggttttttccagaccgaccgtttccagcagctgcgtgtcgataaatttgaaacccaggctacccagaccataagaaccgatagcgaacgcggagatcagacctttacgctccgggaaccacttcacacagttagagagcgtcagcagataacccgcgccatctgccagtcccaccagcacaccggcgcttaaccacagcatcatcaggttgtcagaatgcgctgtcaggaagaagcctaatcccagcaaaatgccggaagccatggtgacgcgtttaacgccaaaacgttcctgtaatttgcccgcaacagaagagctaattgccagccccagacttaacaagccgaaagagaaagcgacctggcttaccggcgcatccagcttggcggaaagcgcgccattaaacaggctccaggtataaacgctccccagcgcaaactgggtaatgatagtaccgatgagtgtcagccagcgggtacgctgataattactaggtgtcatggcagtattcctgcagtaataaaaaggaaaaatctctgccgacaaccataacgaagtgcactttatgcctggggaaaaacggcatgaaatgccatcagaacggaatgaaatgccttagttcaggaatgaatgacgcgacaattattcaccaaatttattatttggtaagttagcacccactatcgccacaactattgttatttaatggtttcaattgtgactgttacgttaaaatctggcgctaacccccatcgtatacagatagtcgctattattagtggtattttctgcctgagttagcgcggcataggcggcaatattttgattgagcaacatatcagcgcctacggtgacatccagccagttgccgttctggtttgtcgccgtcatccggctcaggccactttgcgccttccagatattctcgccaaattgctggttatagctgatttgcgcccagggtcggagatcgccaagccgggagtcaacacgccagcctaaggtactcacgctggcatgccataacggatcggtcagcgtggtagtactgtcgccaaactcgttatacatgctggtggttgtgccatcgtaatgtaatgccgcgaccgggccggttgtaacctgttcatataaaggaaaattccagcccatactcatactgctggtcacatccacaggggtttcttccgccagattgacttccagtcccagcgccctttggctactttgaatacgttggctcaaaatatcgttgtaatcaggttgatgatcactatcccaggtgtaacgctctgtggaaagtccgggttgcgtatcaacgatatattcttgttgccaggcgtaagctgtgttgagaaaaaaggcactgattaccacgctcgccagcaggcttagctgccagcgaccaccgcttttttttatgatcattaacacgactccagggaagagccgaattcggcaatattattgtcattgtatgaaggatatcgggcatagtagccctgtattaaatattgactttttcaccgatgcgtcaagaaaagcggctgaaatttttacgatcgggtacatagcgagggaaagtatggaacgttgcggctgggtgagtcaggacccgctttatattgcctaccatgataatgagtggggcgtgcctgaaactgacagtaaaaaactgttcgaaatgatctgccttgaagggcagcaggctggattaagctggatcaccgtcctcaaaaaacgcgaaaactatcgcgcctgctttcatcagttcgatccggtgaaggtcgcagcaatgcaggaagaggatgtcgaaagactggtacaggacgccgggattatccgccatcgagggaaaattcaggcaattattggtaatgcgcgggcgtacctgcaaatggaacagaacggcgaaccgtttgtcgactttgtctggagctttgtaaatcatcagccacaggtgacacaagccacaacgttgagcgaaattcccacatctacgtccgcctccgacgccctatctaaggcactgaaaaaacgtggttttaagtttgtcggcaccacaatctgttactcctttatgcaggcatgtgggctggtgaatgatcatgtggttggctgctgttgctatccgggaaataaaccatgattcgggaagcgcaacgtagtgaactccccgcgatcctcgaactgtggctggaaagtacaacctgggggcatccctttataaaagcgaattactggcgtgactgcattccgctggtgcgggatgcctatcttgccaacgcgcaaaactgggtctgggaagaagacggtaagcttctcggttttgtcagcattatggaaggccgatttctggcagcgatgtttgtcgcaccgaaggccgtcaggcgcggtattggtaaggcgctgatgcagtatgtgcagcagcgccatccccacctgatgctggaggtttatcaaaaaaatcaaccggcgataaatttttaccaggcacagggttttcacattgtcgattgcgcatggcaggatgaaacccaactacccacatggattatgagctggccggtggttcaaacgctgtaattaactgctggccggtggttcaaacgctgtaagtgtcagttccggaccgttgtatttttccagccatgccagcgccgtattacccgcacagccattccccagccggctgctggggagatctttggtcagcacgttcactgcgccgtttttacaaataccgtcagcggttaaatccagatccggccatgccccttcgtgaatgcaaatcacgccaggtttaattccctcgctaatgaccgctccggcaagaatttgcccgcgtgcgttccacaaccgaacagtatcgccatcttgtatgccgcgctcctgggcatcgtcaggatgaatggtgacaggctcacgatttgccaccgcgtacaattcgcgcagagaactgtaattcagctggctgtgcaggcggtgcgccggatgggcagaaagtacctgcaactgttctggttcggcattgccctgccattcgtccggctccagccacattggatgcccagggcaatccgggtaaccgtaatcggcaatacgctgactgaagatttcaatcttgccgctggcggtttttaacggatgcgccagcggatcgcggcaaaaatcagcgaagcgaataaaccgctcgctgtccgggttttccggcatctcaattaactggttggcttgccagaactcagcaaatggcggcaattcaacctgctggcttgccccgcgctgtcgggcaacgttataaaacgtttccagccattgcagctcactttttccttccgtaaaacgtgcataaccgcccttctcccagcgttcacttaactcggcaaaaacatcaaaatcattacgcgcttcatagcgtggcggcaccacttgcttcatcggcaccagatgctgattactgtaatcaccggtcatggtgagatcattacgctcaaaagaggtagtcgcaggcagaacgatatccgcgtgttttgccgccgccgtccagaagcattcagagatcaccaccagctccggtttttgccaggcacggatcaggcgattggtatcctgatgatgagtaaagttggcaccgcccgcccaccagataaaacgaatatccgggaaatgtcggttcataccgttgtgttgatatgcgccaccagggttttccagtgcttcaacaatgcgggcaacagggattttatccaccgcatcgcagccacccggcaagctgccctgcatggaagagagcaccgcagaacgccgcgtggggttaccaccattggcaaaatggtaagaaagaccaaaaccgccgccgggtgtgccgatttgccccaacattgctgccagcgtgacgatcatccagtgtttttgctcaccaaactgttggcgctgcattccccagcctgccatcagcatggtggtattttggtggaaaatagccgccagctcgcggattttcgctgcgccaacaccacaaatctctgctgcccattcggcggttttcgctattccgtcactctcgcccagcaaataagaggcgaagacggcataacctgtggtgcaacgcgccagaaacgcttcgtcgtgccaaccattttccaccagcgtatgggcgatccccagcatcagcgcaacatcggtgcccatgtgcggtgccacccactccattttatcgccaaagaaatcgacggtttcgcttcgcattggatcaatgcagatcagctttttcccgctgtcacgcagtgcagaaaagtaagaaagcccctgctcatcggatgcattccacgcaattttcagcgtattgagtgggttagcactccacagcaccacgacatcgctatgttccagcaccagcggccaactggtctgctgttgataaacttcactaccacccacgacatacggcatgatcgcctgtgccgcgccggtgctataatcccccagatgcccggtataaccgcctgccagcgccatatagcgttgtaataatgtgctggccttatgcagcacgccgttactacgccagccgtaggaaccagcaaaaatgcttgccggaccataagcctcacgaatgcgtttatgttgttggtgaataagatccagcgcctcatcccaactcacgcgaacaaattcatcctgcccacgaatgccttgcgggttttccggactcgcaagaaagccttttcgcaccattggaaatcgtacccgcgtattgctgtgaacctggtcgcgaaccgcgctctgcaaggagttttccattcctgtggctaacgcgccacggctgctaaacacggtttcgccgtcggtttcaaccagcatgggcccccaatgggcggcagtcagaacggaatatcgtgaggatgagttggccaaaccgaagactcctgaaaggttagatgtattgagcagttaaatattacttacaaatttccgagtattcccaggaataatcttcatgttcacgcggcataatctcccgccacggaacccgtggcaaagaataaaaaggttattaaggattaacaatgaagaaacgtgtttatcttattgccgccgtagtgagtggcgctctggcggtatctggctgcacaactaacccttacaccggcgaacgcgaagcaggtaaatctgctatcggcgcaggtctgggctctctcgtgggcgcgggtattggtgcgctctcttctagcaagaaagatcgcggtaaaggcgcgctgattggcgcagcagcaggcgcagctctgggcggcggcgttggttattacatggatgtgcaggaagcgaagctgcgcgacaaaatgcgcggcactggtgttagcgtaacccgcagcggggataacattatcctcaatatgccgaacaatgtgaccttcgacagcagcagcgcgaccctgaaaccggcgggcgctaacaccctgaccggcgtggcaatggtactgaaagagtatccgaaaacggcggttaacgtgattggttataccgacagcacgggtggtcacgacctgaacatgcgtctctcccagcaacgtgcggattccgttgccagcgcgttgatcacccagggcgtggacgccagccgcatccgtactcagggccttggcccggctaacccaatcgccagcaacagcaccgcagaaggtaaggcgcaaaaccgccgtgtagaaattaccttaagcccgctgtaatccctttcatgccaggtgatgcagaaatcacctggcattcttcagttttccttcatcatatttcaggctaaggtgatcgccttatcagtgaatggagagaagcatgaagccgtccgttatcctctacaaagccttacctgatgatttactgcaacgcctgcaagagcatttcaccgttcaccaggtggcaaacctcagcccacaaaccgtcgaacaaaatgcagcaatttttgccgaagctgaaggtttactgggtagtaacgagaatgtaaatgccgcattgctggaaaaaatgccgaaactgcgtgccacaagtacgatctccgtcggctatgacaattttgatgtcgatgcgcttaccgcccgaaaaattctgctgatgcacacgccaaccgtattaacagaaaccgtcgccgatacgctgatggcgctggtgttgtctaccgctcgtcgggttgtggaggtagcagaacgggtaaaagcaggcgaatggaccgcgagcataggcccggactggtacggcactgacgttcaccataaaacactgggcattgtcgggatgggacggatcggcatggcgctggcacaacgtgcgcactttggcttcaacatgcccatcctctataacgcgcgccgccaccataaagaagcagaagaacgcttcaacgcccgctactgcgatttggatactctgttacaagagagtgatttcgtttgcctgatcctgccgttaactgatgagacgcatcatctgtttggcgcagaacaattcgccaaaatgaaatcctccgccattttcattaatgccggatgtggcccggtggttgacgaaaatgcactgatcgcagcattgcagaaaggcgaaattcacgctgccgggctggatgtcttcgaacaagagccactgtccgtagatagcccgttgctcagtatggccaacgtcgtcgcagtaccgcatattggatctgccacccatgagacgcgttatggcatggccgcctgtgccgtggataatttgattgatgcgttacaaggaaaggttgagaagaactgtgtgaatccgcacgtcgcggactaagccgcgactgcgtagagtaaagcccgataatcgctcgggcttttactctttattgggttgcagtaactgctgtagtccaggcctgattaaacgcctgatgctgtgccggtaatggcgcaatcagtttgttatattcacttgcctgctgactagtcgggaactggatgccatttgcgacaaagctcacctgagtaccttgctgagcaatgtagtctccaaccatcaccagttgttgcgtgaaagtttgtgccgccggaatcaacggttgcaatgcatcagctggcgtcgttaccactttggtgaatgcctgatcaaagaccggtttcaaatcatcgctctgttttagcgcagagtgcgcagcatcggcctgcaacttcgcattttgcagttgttgcgccagcacacccaggctaccgttcatttcacgcagcggaccgctttgcgtaacgtaatcctgcggtacgcgaattgcgttaacgctgtctacaaccgggcgcagaccggaatccatcgcctgattcacctgctgagaataaccatacagaatcgcgtaatcagagacaaaaggaccaaactgttttttctgatcggcagtcagggttggtagacgttcaccgctacgcatcactgtattctgcaggaagtcgataaacgctttacgctgatcgccttctttatcaaaacacccactcaggctaactaccattaataacgccgcaagaggcgcaaaccagcgagagcaggactttcctgtcgccattttcttactcctttcacccaaaaaaagcgcacaacgacacacgcgtgtctgacgtgacaaggatagtccaggacaggcttgcaggataccctttctacgtaatcttcctggtaaaatcatggagaaaatgaaacaaggttaatttgttgtttcattgttaaaaaatgatagtgccgttgccttttttgtagccagagatttacgccttcgcagaaggttagattttcgaaatctttacaaaacaggagtggtaagagatatatcggcatttatcagatcgttaggtggctataagtcacgctaaatgacaggctgaatcgaatcatagccagagcatgccctgacttcaccccgctgtgtctgcttttcccgactattcttaatgagcttcgatgcaattcacgatcccgcagtgtgatttgaggagttttcaatggaatataaagatccaatgcatgagctgttgagcagcctggaacagattgtttttaaagatgaaacgcagaaaattaccctgacgcacagaacaacgtcctgtaccgaaattgagcagttacgaaaagggacaggattaaaaatcgatgatttcgcccgggttttgggcgtaagtgtcgccatggtaaaggaatgggaatccagacgcgtgaagcctagtagtgccgaactaaaattgatgcgtttgattcaagccaacccggcattaagtaagcagttgatggaataaacttttatccactttattgctgtttacggtcctgatgacaggaccgttttccaaccgattaatcataaatatgaaaaataattgttgcatcacccgccaatgcgtggcttaatgcacatcaacggtttgacgtacagaccattaaagcagtgtagtaaggcaagtcccttcaagagttatcgttgatacccctcgtagtgcacattcctttaacgcttcaaaatctgtaaagcacgccatatcgccgaaaggcacacttaattattaaaggtaatacactatgtccggtaaaatgactggtatcgtaaaatggttcaacgctgacaaaggcttcggcttcatcactcctgacgatggctctaaagatgtgttcgtacacttctctgctatccagaacgatggttacaaatctctggacgaaggtcagaaagtgtccttcaccatcgaaagcggcgctaaaggcccggcagctggtaacgtaaccagcctgtaatctctgcttaaaagcacagaatctaagatccctgccatttggcggggatttttttatttgttttcaggaaataaataatcgatcgcgtaataaaatctattattatttttgtgaagaataaatttgggtgcaatgagaatgcgcaacgccgtaagtaaggcgggaataatttcccgccgaagactcttactctttcaatttgcaggctaaaaacgccgccagctcataactctcctgtttaatatgcaattcacacagtgaatctcttatcatccaggtgaaaaataaaagcgtgaaacaaatcactattaaagaaagtaatctatatttctgcgcattcccagcctcctgtgttgatttccaacgagtataactttgatttatagtcaggtggggcttttctctgtctgcctttcggtgaatacctgagacaaacagtctcaagcacccgtggctattctagcttaataagtttgtttcttctccttgatataatcctaaaaaaatctcataaaattaatatatgagataatctttattcagcagaagattattaaaggttgctgtattatttagcgataaaaaaagcctgccagatggcaggctatttaataacggcgttattattgcaacaggctaatatccgcaacgcgcaggaacagttcgcgcagtttctccagcatggtcagacggttgatacgcaattctttgtcatcaaccatgaccatcactttatcgaagaaagcatcaaccggttcacgcagctcagccagttcgaccagcgcatcctggtaacgaccttccgtaaagtacggctccagcttgtcacgtagcaccacaacctgcatcgccagtttaatttcttccggctctttcagggtagaggcattcacgcggtcgctcagcacttcgtcagatttcgccagaatgttagatacacgtttgttcgccgccgccagtgcagcagctgcatccagggtacggaaatggcttaccgctttcatacgggcatcgaaatcagccggacgagtcggacgacgcgccagtaccgcctggatggtgtcaacggtataaccttcgtcctgataccaggcgcggaagcgaccgagcataaagtcgataacatcatcaactacgttggcattagtcagcttatcgccatacagacgcaccgcttcttcggtcagcgtttgcagatcaaggttgaggttcttctcaacgataattcgcagcacgccaagcgcggcacgacgcagcgcaaacgggtctttgtcgcctttcggatgctgaccgataccgaagatacccgccagggtatccatcttgtcagcaatcgccagcgcacaagctactgggttggacggcaggtcatcaccagcaaaacgcggctgatactgctcattcagcgccaccgcgacatcttccgcttcgccatcgtgacgcgcatagtgcatccccataacgccctgggtgtcggtgaactcgaagaccatgttggtcatcaggtcgcacttagacagcagacccgcacgggtagcgtggttaacgtcagcgccaatctgttcagcaatccagccagccagcgcctggatgcggtcagttttgtcgcgcagcgtccccaactgttgctggaacaacacggtttgcaggcgcggcaggttatcttcaagacgttttttacggtcggtgttgaagaagaactcggcatccgccagacgcggacgaacgactttctcgttaccggagataatctgctgcggatctttgctttcgatgttggcaacgaagataaagttcggcagcagtttgccgtcgttcgcatacaccgggaagtatttctggtcacctttcatggtgtaaaccagcgcttcagccggcaccgcgaggaatttctcttcgaattttgcggtcagaacgaccggccactccaccaggctagccacttcttccagcaggctttcgcttaagtcagcgttaccgccaatcttacgcgctgcttcttcggcatcggctttaatcttcgccttacgttcttcgtaatcggcgatgactttcccacgctcacgcagaatttccggatactgatcggcgttatcgatggtgaattccggctcgcccataaagcggtggccgcgaatcacgcgatcggactgaatgcccagaatggttgccggaatgactttgtcgcccagcagcagggtcacggtgtgcaccggacgcacgaagtgcacgtcgcttgcgccccaacgcatcagtttcgggatcggcagtttcgccagagaagtcgcaaccatattcggcagcagtgcttcggtgctttcgcccttcacatgggcgcgatacagcagccattcgcctttatcggtagtcagacgctcagcctggtcaacggtaataccgcaaccacgcgcccaaccttctgccgctttgctcggtttgccttcagcgtcgaacgcctgggcaatcgccgggccgcgtttttcgatttcacgatccggttgcgcttccgccaggttagctactttcagcgccagacgacgcggagcagcaaaccattgaacggtgccgtgtgcgaggccagcgttatccagctccgcagtaaagttcgcagcaaaggactcagccaggctgcgcagtgcttttggtggcagctcttcagtgccgatttccaccagaaaagttttctcagacatagccgcctcttacttatctttgttgcacatcgggaagccgagggcttcacgggaagcgtagtatgcttctgccactgctttggtcagggtgcgaatgcgcagaatgtagcgctgacgctcggtgacggagatggctttacgcgcatccagcaggttgaagctgtgggcggctttcagaatacgctcgtaggctggcagcggcagcggattttccagcgccagcagctgctgcgcttctttctcgtactgctcgaagcaggtgaacaggaagtccacatccgcgtattcgaagttgtaagtggactgctccacttcgttctgatggaacacgtcgccgtaggtggttttacccagcgggccgtcgctccagaccaggtcgtaaacgctgtctacgccctgaatgtacatggccagacgttccagaccgtaggtgatctcgccggtaaccggtttacactccagaccaccaacctgctggaagtaagtgaactgcgtcacttccatgccgttcagccacacttcccagcccagtccccaggcacccagcgtcgggttttcccagttatcttccacgaaacggatgtcgtgaatagtcgggtccatgcccagctctttcagagaaccgaggtacagctcctgaatattgtccgggcttggcttaatgaccacctggaactgatagtagtgctgtaaacggttggggttttcgccgtagcgaccatcggtcgggcgacgagaaggctgaacataagcagccgccatcggttctggccccagctcgcgcagacaggtcattgggtgagaggttcccgcgccgacttccatgtccaatggttgaacaatggtgcagccctggcgagcccagtaatcctgtaaggtcaggatcaagccctggaaggtcctggtatcaaacttttgcatattatttcgtgctggatacgtgtggatttaaaggaagggatcagtatacccgctggatggaagatatacagtacgaaacgggaaaaagcagggcttaacgcatggaaagatgcaaaaaatggccatccgcgtcaaaagaacagacaaactgctctttacggaaggtataaccgcgcatttcatagcttccctggaactgttcgaaggcggtgacgtcgattttttgctcgccggtgttataacgttttgccgcctgatccttgcataacgcttccatattcaagctacgcagaggatcaacctttacccgttgtgctttctgcacgggactcggtatagaacaacccactagcaccataagcgccattgccggaaagaaagcgttcatcatcattaaattaccgtctggtttgcaggtgagtcttattatttatatcggtatagtggctgatatcttacgaatttccttaagcctctataagctgtagtgataaaactcagattattccagtgcgccaaccaaatgatttatcggtcagactttttttaaccagatacagagacacagatgcagcccaaaatttactggattgataacctgcgagggatagcgtgtttaatggtggtgatgattcacaccactacctggtatgtgaccaatgctcatagtgttagccccgtcacatgggatatcgccaatgttctgaattctgcctctcgtgtcagcgtgccgctatttttcatgatttccggctatctcttttttggcgaacgcagcgcccagccgcgccatttcttgcgtatcggcttatgtctgattttttatagcgcaatcgcactgctctacattgcgctgtttacctccatcaatatggagttagcgctgaaaaacctgctgcaaaagccagtgttttaccacttgtggtttttcttcgcgattgcggtgatttatctggttagtccgctgattcaggtgaagaacgtcggcggaaaaatgttgctggtgctaatggcggtgattggcattatcgctaacccaaacacagtgccgcagaaaattgacggttttgaatggctgccaattaacttatatatcaatggcgatactttttactacattctgtatggcatgttgggccgcgctatagggatgatggacacacagcataaagcactgagctgggtgagcgccgcgctgtttgcgacgggggtttttattatctctcgcgggacattatatgaattgcagtggcgcggaaattttgccgatacctggtatctttactgtgggccgatggtttttatctgcgcaatcgcgctattgactctggttaaaaacacgctggatacgcgtaccattcgcggacttggcttaatctcccgccatagtttgggtatatacggattccacgccttgattatccatgcgctgcgcacccggggaattgagcttaaaaattggccaatactggatattatttggatcttttgcgcgacgttggcagcgagtttgttactttctatgctggtacaacgaatcgacagaaacagattagtgagttaagtaaaagcccggtcacattggactgaccgggcttacgtgagttattcgctgtattcttcctgggtaacctgtgtttcttttggtgggtttattccggcatcacgaatatttttctgcaccgctactgcaccaaacaagcttaagaagaaagccagtccataaaaacctttttcgctgagtaataatgtcgcattccacagacctaccatcagtaatgcaacagagataataaagacagtcaggcaggtcatataataaatggaagtggtcggtatgccttcatacttgtcccgaacggtcttttgataagacgccgcagaaaacagtcctaataccagtacggcaaaataatatcctttttcatttaactgcatctctgcattccatagccctaacagataggtaacgataccaccaacgagagctatccaactcacaatactaaaggccggactataggtacttattttgttgtccatcacagtattcctttcattcctgaatatgtaagagctttatgttgctcatgcgctgcgaaacaaacgcatttgaccaaacaagcagacaaaaaaggcgatgggatagatcaccatttcataagtattgataggtgcgtttaaaacaccgataaacaagagaccgatagtgattaacgcaactaactggcagatatgggtaaaaaaatcatccagttgcccgagtttttctgcgcgaagatatgcatagttgccaaaagttgctgtcattaacacgccaagaaaatagccttttccacttaacaatgggcaactgatccatagcccaaccagataaaccagcgccccgacaacaaataatagtttcgccacagtcttactggttttcataacgatctccatatctaccagcgatacattacgagtaaccaacgaaagacaaaactgaaaaatgccattaacaaatgattttcagaataaattcatactaaatattaattaattactgagatatatagatgtgaattatcccccacccggtcaggcaggggataacgtttacgccattaatggcagaagttgctgatagaggcgacggaacgtttctcgtcgtggctgataagcggcataacgctgcgcatctggtagatggctctgttctaacggtagttgcggcaacaattcaatgaggcttttctctggattcgccgcgatctgcgccagccttgctgcgcccagtgctggccccacatccccccccgtacggtaatcgagctgctgaccgctgatatccgccagcatctgacgccagtactcactacgcgccccgcccccaatcaacgtaacactttgcggtttaataccgcaggcatgcacgacatccatgccatctgccagcgcataacccacgccttccagcactgctcgcgccagttcattggggccatgttgatgagtcaaaccaaagaaaacccccttcgcctggggattattgtgtggcgtacgctcgccggaaagataaggcagaaaccaaactggctcggcactttcatcagcctgttgagctgcagcgattaaagctgggacattgctcaggccggttaatttcgcggcccaatccagacagctcgctgcactcagcatcacagacattaaatgccaacgttgcggtagcgcatggcaaaagctatgtacggcgctttctggcttgcttaagaacccttcgctgacagcaaaatagaccccgctcgtccccaggcttaacattgcctgattagcatcaaccattcccacaccaactgcaccagctgcattgtcgccaccgcctgcgacaactggcaccgtcgccataccccacgctttcgcaacttcaggtaacaaagcaccagtaatttcgctgccttcgtataatgcgggcatctggtcacgagataagtcgcaagcctgcagcatgacgtcactccagtcacgctttgcgacatccagccacatggtgccagctgcgtcagacatatcgctggcaaactcccccgtcatacgcagacgcaagtaatctttcggtaataatactttgtcgatttgacggaatatctccggctcatgccgctgaacccatagcaatttaggcgcagtaaatccgggcatcatcaggttgccggtaatcacccggctttgcggaactcgcgcttccagcaaagtgcactcttgcgcacagcgcccgtcgttccacaaaatggcagggcgtaacacccgttgctgagcatccagcaaggttgctccgtgcatctggccggcaatacccaatgctttaacgtcctgcagagaatgctgatcgcccagagctttcattgcgcgatcagttgcctgccaccactgttccgggtcttgttcgctccagagtggatgcgggcggctaacggtcagcttttccgtttgcgcagcaaccacctcaccctgctcgttgagcaaaataacttttacgccgctggtgccaagatctatcccgatatacatatcgatcgttccttaaaaaaatgcccggtatcgctaccgataaccgggccaacggactgcacagttagccgttatttgtcgaacagataatggtttaccagattttccagttgttcctggcgaccactctgatgcaccggagacaaatgatgttcctgagcatatttggctaaatctgccagactcatttggcctttcaggatttgctggcccaattcgctattccagccggaataacgctgcgcgatgcgtttatccagctcgccatcttcaatcatgcgcgctgcaattttcagcgccagtgccatcgtatccatcgcgccgatatgaccgtaaaacagatcatatttatcagtactttgacgacgtactttggcatcgaagttcagaccaccggtggtgaaaccgcctgctttgagaatttcatacatcaccagcgcattctcttccacactgttcgggaactggtcggtgtcccagcccagttgcgcatcgccacggttggcgtcgacagaaccgaacaggccaagcgcaatggcggtggctatttcatgatggaaagagtgacctgccagcgtcgcgtggttagcttcaatgttcagtttaatctctttttccagaccaaactgtttcaggaagccatagaccgtcgcggcatcgtaatcatattgatgtttggtcggttcttgcggtttcggttcgataagcaacgtgccctggaaaccgattttatgtttatgctcaaccaccatctgcataaagcggcccagttgttcacgctcctgacgcaagtcggtatttaacagcgtttcgtaaccttcacgaccgccccacaggacatagttttcaccgcccaatttatgggttgcttccatcgctgtaacaacttgcgttgccgcccagctgaagacttcaggatctgggttcgtcgccgcacccgcgccgtagcgagggtttgtaaagcagttggccgttccccacagcagcttcacgccgctctcttcttgcttgcctgccaggacatcaaccatttgcgcaaaattattgatgtactcttttaagctcgcgccctcaggggaaacatccacatcgtggaagcaataaaatggcacatgtaacttgtggaaaaactcaaatgcgacatctgctttacgcttcgccaacgccagtgcctcaccaggctgctgccacggacgattaaacgcccccacaccaaacatatccgccccgttccagcagaaggtgtgccagtagcaggcggcaaaacgcaagtgctcttccatacgcttacccaacaccagttcgtcgggattgtagtgacggaatgctaacgggttactggatttactgccttcataacgaacgcgatcgagctggtcaaaataggcttgcatattgaactccataatcaggtaatgccgcgggtgatggatgatgtcgtaatattgggcactccctttcagttgctcaattatgttatttcacactgctattgagataattcacaagtgtgcgctcgctcgcaaaataaaatggaatgatgaaactgggtaattcctcgaagagaaaaatgcaataagtacaattgcgcaacaaaagtaagatctcggtcataaatcaagaaataaaccaaaaatcgtaatcgaaagataaaaatctgtaattgttttcccctgtttagttgctaaaaattggttacgtttatcgcggtgattgttacttattaaaactgtcctctaactacagaaggccctacaccatgaaaataaagaacattctactcaccctttgcaccagtctcctgcttaccaacgttgctgcacacgccaaagaagtcaaaataggtatggcgattgatgatctccgtcttgaacgctggcaaaaagatcgagatatctttgtgaaaaaggcagaatctctcggcgcgaaagtatttgtacagtctgcaaatggcaatgaagaaacacaaatgagccagattgaaaacatgataaaccggggtgtcgatgttcttgtcattattccgtataacggtcaggtattaagtaacgttgtaaaagaagccaaacaagaaggcattaaagtattagcttacgaccgtatgattaacgatgcggatatcgatttttatatttctttcgataacgaaaaagtcggtgaactgcaggcaaaagccctggtcgatattgttccgcaaggtaattacttcctgatgggcggcagcccggtagataacaacgccaagctgttccgcgccggacaaatgaaagtgttaaaaccttacgttgattccggaaaaattaaagtcgttggtgaccaatgggttgatggctggttaccggaaaacgcattgaaaattatggaaaacgcgctaaccgccaataataacaaaattgatgctgtagttgccagtaacgatgccaccgcaggtggggcaattcaggcattaagcgcgcaaggtttaagtgggaaagtagcaatctccggccaggatgcggatctcgcaggtattaaacgtattgctgccggtacgcaaactatgacggtgtataaacctattacgttgttggcaaatactgccgcagaaattgccgttgagttgggcaatggtcaggaaccaaaagcagataccacactgaataatggcctgaaagatgtcccctcccgcctcctgacaccgatcgatgtgaataaaaacaacatcaaagatacggtaattaaagacggattccacaaagagagcgagctgtaagcgttacgccccagcgcggagcgggggcgtgatttctctccatgccgcgtgaatgaattggcttaggtggagtcgttatgccttatctacttgaaatgaagaacattaccaaaaccttcggcagtgtgaaggcgattgataacgtctgcttgcggttgaatgctggcgaaatcgtcagtctttgtggggaaaatgggtctggtaaaagtacgctgatgaaagtgctgtgtggtatttatccccatggctcctacgaaggcgaaattatttttgcgggagaagagattcaggcgagtcacatccgcgataccgaacgcaaaggtatcgccatcattcatcaggaattggccctggtgaaagaattgaccgtgctggaaaatatcttcctgggtaacgaaataacccacaatggcattatggattatgacctgatgacgctacgctgtcagaagctgctcgcacaggtcagtttatccattagtcctgatacccgcgttggcgatttagggcttgggcaacaacaactggttgaaattgccaaggcacttaataaacaggtgcgcttgttaattctcgatgaaccgacagccagtttaactgagcaggaaacgagcattttactggatattattcgcgatctacaacagcacggtatcgcctgtatttatattagccacaaactcaacgaagtcaaagcgatttccgatacgatttgcgttattcgcgacggacagcacattggtacgcgtgatgctgccggaatgagtgaagacgatattatcaccatgatggtcgggcgagagttaaccgcgctttaccctaatgaaccacataccaccggagatgaaatattacgtattgaacatctgacggcatggcatccggttaatcgtcatattaaacgagttaatgatgtcagcttttccctgaaacgtggcgaaatattgggtattgccggactcgttggtgccggacgtaccgagaccattcagtgcctgtttggtgtgtggcccggacaatgggaaggaaaaatttatattgatggcaaacaggtagatattcgtaactgtcagcaagccatcgcccaggggattgcgatggtccccgaagacagaaagcgcgacggcatcgttccggtaatggcggttggtaaaaatattaccctcgccgcactcaataaatttaccggtggcattagccagcttgatgacgcggcagagcaaaaatgtattctggaaagtatccagcaactcaaagttaaaacgagctcccccgaccttgctattggacgtttgagcggcggcaatcagcaaaaagcgatcctcgctcgctgtctgttacttaacccgcgcattctcattcttgatgaacccaccaggggtatcgatattggcgcgaaatacgagatctacaaattaattaaccaactcgtccagcagggtattgccgttattgtcatctcttccgaattacctgaagtgctcggccttagcgatcgtgtactggtgatgcatgaagggaaactaaaagccaacctgataaatcataacctgactcaggagcaggtgatggaagccgcattgaggagcgaacatcatgtcgaaaagcaatccgtctgaataacgcattgaggagcgaacatcatgagcaaaagcaatccgtctgaagtgaaattggccgtaccgacatccggtggcttctccgggctgaaaagtctgaatttgcaggtcttcgtgatgattgcagctatcatcgcaatcatgctgttctttacctggaccaccgatggtgcctacttaagcgcccgtaacgtctccaacctgttacgccagaccgcgattaccggcatcctcgcggtaggaatggtgttcgtcataatttctgctgaaatcgacctttccgtcggcagtatgatggggctgttaggtggcgtcgcggcgatttgtgacgtctggttaggctggcctttgccacttaccatcattgtgacgctggttctgggactgcttctcggtgcctggaacggatggtgggtcgcgtaccgtaaagtccctagttttattgtcaccctcgcgggcatgttggcatttcgcggcatactcattggcatcaccaacggcacgactgtatcccccaccagcgccgcgatgagtcaaattgggcaaagctatctccccgccagtaccggcttcatcattggcgcgcttggcttaatggcttttgttggttggcaatggcgcggaagaatgcgccgtcaggctttgggtttacagtctccggcctctaccgcagtagtcggtcgccaggctttaaccgctatcatcgtattaggcgcaatctggctgttgaatgattaccgtggcgttcccactcctgttctgctgctgacgttgctgttactcggcggaatgtttatggcaacgcggacggcatttggacgacgcatttatgccatcggcggcaatctggaagcagcacgtctctccgggattaacgttgaacgcaccaaacttgccgtgttcgcgattaacggattaatggtagccatcgccggattaatccttagttctcgacttggcgctggtagtccttctgcgggaaatatcgccgaactggacgcaattgcagcatgcgtgattggcggcaccagcctggctggcggtgtgggaagcgttgccggagcagtaatgggggcatttatcatggctagtctggataacggcatgagtatgatggatgtaccgaccttctggcagtatatcgttaaaggtgcgattctgttgctggcagtatggatggactccgcaaccaaacgccgttcttgattttgataaaaattttctcaaagccggttacgtattaccggttttgagtttttgcatgattcagcaggaaaagaaccatgtttactaaacgtcaccgcatcacattactgttcaatgccaataaagcctatgaccggcaggtagtagaaggcgtaggggaatatttacaggcgagtcaaagcgaatgggatattttcattgaagaagatttccgcgcccgcattgataaaatcaaggactggttaggagatggcgtcattgccgacttcgacgacaaacagatcgagcaagcgctggctgatgtcgacgtccccattgttggggttggcggcagctatcaccttgcagaaagttacccacccgttcattacattgccaccgataactatgcgctggttgaaagcgcatttttgcatttaaaagagaaaggcgttaaccgctttgctttttatggtcttccggaaagtagcggcaaacgttgggccactgagcgcgaatatgcatttcgtcagcttgtcgccgaagaaaagtatcgcggagtggtttatcaggggttagaaaccgcgccagagaactggcaacacgcgcaaaatcggctggcagactggctacaaacgctaccaccgcaaaccgggattattgccgttactgacgcccgagcgcggcatattctgcaagtatgtgaacatctacatattcccgtaccggaaaaattatgcgtgattggcatcgataacgaagaactgacccgctatctgagccgtgtcgccctttctagcgtcgctcagggcgcgcggcaaatgggctatcaggcggcaaaactgttgcatcgattattagataaagaagaaatgccgctacagcgaattttggtcccaccagttcgcgtcattgaacggcgcagtacagattatcgcagcctgaccgatcccgccgttattcaggccatgcattacattcgtaatcacgcctgtaaagggattaaagtggatcaggtactggatgcggtcgggatcagccgctccaatcttgagaagcgttttaaagaagaggtgggtgaaaccatccatgccatgattcatgccgagaagctggagaaagcgcgcagtctgctgattagtaccaccttgagcatcaatgagataagccaaatgtgcggttatccaagcctgcaatatttctactctgtttttaaaaaagcatatgacacgacgccaaaagagtatcgcgatgtaaatagcgaggtcatgttgtaacgatgatgagaattgtcggcgtcacatcaggtaacgctgcgtggttgtcggatgcggcgtgaacgccttatccgacctacccgccaggcatgataaaacgcaccaacaacgcttcaggctcgtagctcaactgcctgagacaaagtaaaaagccttatccgactgacaagtcggataaggctcaaggaaatgcaattacatatgcgccgcgattaaccgttggttatcctggtacattgcgaacaggtagttgttataactcttccctttggtgctgtagcccttcagcttgtgaatcatcgctgtggcagtcacttcctgatccgctttacgcagctgcgcacggcttttacggaagctagagtaagccgggtgcgtattcaggttagtgacataggcgctcacgctttctttgacagaactaaactgactgtaccctttcactttacctggcgcattggtacaacgtcctttcatgcatttcatgccgaacaggttgttgttgttgcgcgccagcttgctcgttccccaaccgctttctgctgcagccatcgtcgccaccatactggtggggataatgtctacgcgttcaagcaaggtattccacgggatttttcgcgtattaccggaccacttcaccttgtagcgtttggcgatgtctttcagacgcgcacgctcagcaggactccattggccctgatactgtttactaatgagccagttacgttccgcagtaatggccgcattttggctggtaatgtaaggcattacggtccggagaaacgcctttttccttggtgttccggaagggtattttcgcaaatcaggaagactactactctttgcactattgcgagaatactcttgtttactgcttacctgtttattactagctttagttaagtgggacttttgactcgctgttgttgtgtgcgtcttcgctaacacctcactgctaaacaccagagtgagtaacataagaatcatcgccccatatcgtcgtatgggagtcaaaatcatcaggtctcctggtcggatttaatcattccaacaccttatatttttcacaaatttgagagttgaatctcaaatcatatcaaaaatagctgtcaagagcaccccaaggaatagtccaaatctgaaactatgtcacgtgttaacgattcagattggcgctaaatcgcagaaaatgtgggggttatcgcaaaattcagccgttttttgcgcgagatcgctcacccttgcttctcatcctgtggacttaccgctcagggatgagttttgtttggcttatcgctggcaaactgtctgaaatcgcagcaataaggactcatccgccatgaaactcgccgcctgttttctgacactccttcctggcttcgccgttgccgccagctggacttctccggggtttcccgcctttagcgaacaggggacaggaacatttgtcagccacgcgcagttgcccaaaggtacgcgtccactaacgctaaattttgaccaacagtgctggcagcctgcggatgcgataaaactcaatcagatgctttccctgcaaccttgtagcaacacgccgcctcaatggcgattgttcagggacggcgaatatacgctgcaaatagacacccgctccggtacgccaacattgatgatttccatccagaacgccgccgaaccggtagcaagcctggtccgtgaatgcccgaaatgggatggattaccgctcacagtggatgtcagcgccactttcccggaaggagccgccgtacgggattattacagccagcaaattgcgatagtgaagaacggtcaaataatgttacaacccgctgccaccagcaacggtttactcctgctggaacgggcagaaactgacacatccgcccctttcgactggcataacgccacggtttactttgtgctgacagatcgtttcgaaaacggcgatcccagtaatgaccagagttacggacgtcataaagacggtatggcggaaattggcacttttcacggcggcgatttacgcggcctgaccaacaaactggattacctccagcagttgggcgttaatgctttatggataagcgccccatttgagcaaattcacggctgggtcggcggcggtacaaaaggcgatttcccgcattatgcctaccacggttattacacacaggactggacgaatcttgatgccaatatgggcaacgaagccgatctacggacgctggttgatagcgcacatcagcgcggtattcgtattctctttgatgtcgtgatgaaccacaccggctatgccacgctggcggatatgcaggagtatcagtttggcgcgttatatctttctggtgacgaagtgaaaaaaagcctgggtgaacgctggagcgactggaaacctgccgccgggcaaacctggcatagctttaacgattacattaatttcagcgacaaaacaggctgggataaatggtggggaaaaaactggatcagaacggatatcggcgattacgacaatcctggattcgacgatctcactatgagcctagcctttttgccggatatcaaaaccgaaagtactaccgcttctggtctgccggtgttctataaaaacaaaatggatacccacgccaaagccattgacggctatacgccgcgcgattacttaacccactggttaagtcagtgggtccgcgactatgggattgatggttttcgggtcgataccgccaaacatgttgagttgcccgcctggcagcaactgaaaaccgaagccagcgccgcgcttcgcgaatggaaaaaagctaaccccgacaaagcattagatgacaaacctttctggatgaccggtgaagcctggggccacggcgtgatgcaaagtgactactatcgccacggcttcgatgcgatgatcaatttcgattatcaggagcaggcggcgaaagcagtcgactgtctggcgcagatggatacgacctggcagcaaatggcggagaaattgcagggtttcaacgtgttgagctacctcagcagccatgatacccgcctgttccgtgaagggggcgacaaagcagcagagttattactattagcgccaggcgcggtacaaatcttttatggtgatgaatccagccgtccgttcggtcctacaggttctgatccgctgcaaggtacacgtagcgatatgaactggcaggatgttagcggtaaatctgccgccagcgtcgcgcactggcagaaaatcagccagttccgcgcccgccatcccgcaattggcgcgggcaaacaaacgacacttttgctgaagcagggctacggctttgttcgtgagcatggcgacgataaagtgctggtcgtctgggcagggcaacagtaacttttccggcttcccgttcgtcagtacctcgggaagccgccaaccaggataaaatgtcagccctaatcagcgttgcaggataaagcaccgctcactcttcaacagaccgatttgcaccccagcaaatgtagcgttattgttaccttccttgctacagagttcgacagatatcccgctatgacattctccctttttggtgacaaatttacccgccactccggcattacgctgttgatggaagatctgaacgacggtttacgcacgcctggcgcgattatgctcggcggcggtaatccggcgcagatcccggaaatgcaggactacttccagacgctactgaccgacatgctggaaagtggcaaagcgactgatgcactgtgtaactacgacggtccacaggggaaaacggagctactcacactgcttgccggaatgctgcgcgagaagttgggttgggatatcgaaccacagaatattgcactaacaaacggcagccagagcgcgtttttctacttatttaacctgtttgccggacgccgtgccgatggtcgggtcaaaaaagtgctgttcccgcttgcaccggaatacattggctatgctgacgccggactggaagaagatctgtttgtctctgcgcgtccgaatattgaactgctgccggaaggccagtttaaataccacgtcgattttgagcatctgcatattggcgaagaaaccgggatgatttgcgtctcccggccgacgaatccaacaggcaatgtgattactgacgaagagttgctgaagcttgacgcgctggcgaatcaacacggcattccgctggtgattgataacgcttatggcgtcccgttcccgggtatcatcttcagtgaagcgcgcccgctatggaatccgaatatcgtgctgtgcatgagtctttccaagctgggtctacctggctcccgctgcggcattatcatcgccaatgaaaaaatcatcaccgccatcaccaatatgaacggcattatcagcctggcacctggcggtattggtccggcgatgatgtgtgaaatgattaagcgtaacgatctgctgcgcctgtctgaaacagtcatcaaaccgttttactaccagcgtgttcaggaaactatcgccatcattcgccgctatttaccggaaaatcgctgcctgattcataaaccggaaggagccattttcctctggctatggtttaaggatttgcccattacgaccaagcagctctatcagcgcctgaaagcacgcggcgtgctgatggtgccggggcacaacttcttcccagggctggataaaccgtggccgcatacgcatcaatgtatgcgcatgaactacgtaccagagccggagaaaattgaggcgggggtgaagattctggcggaagagatagaaagagcctgggctgaaagtcactaaaaattgcctgatgcgctacgcttatcaggcctacatgatttctgcaatatattgaatttggaagaatttgtaggccggataaggcgtttacgccgcatctggcataaacaaagcgcactgttccggcgttgagaaacgccggaaaacgtttcaaacaggctgctgccgtagccgatgccgctgcactttctcgacatccatgcactgcaacgcctttgtcgggcaggcttcaacacaggccggtcccgtctcccgatgccagcacagatcgcacttaatcgccctcgcctttttgcggctagaaacgacctccatcgcaccaaacgggcaagccagcatacagcttttacagccaatgcaacgtgtttgttcaacgaaaatatgcccatgttcgcggcttatcgcgtcaacagggcagacattcgcgcacggtgcatcttcacactgatgacaggctactgccgtggtccagcagtggtctttaatgacacgaatacgggaaataaactcgtctggactcaacgcagcgcaatcctgattctcatgatggctcactgcgcaagccacttcacaggtacggcaaccgatacatttcgtcgcatccgcaataataaaccggttcatgatcactcctttgcactaaaacagcagagtgccagagagcgcgtccctactgctttgatccaacgaaggaaatgttaaagttttggcacttgtccaaagcgttatgtgatcgcgcccaggtcatccctgacagtaaatcccagttcattagaaatagcctgcgcggtttcacgcagtggtttcaggagatttttctctcccacctgtttcagacgacttgtgctaaggctaatgctcacggcgtacggcacccgcccatgaatatcaaacaccggaacagcaatacaggagacgccgagttcgttttcttctctgtccatcgccgctccgctttcacgaatgtgcgccagttcgtcgaacatcgcgggcagctcggtaatggtattgcgggttaacggctggatctcatgctgatggctttcccagtaactcttcacgtagtccgggtgaccaaacgccatgtagatcttgcccattgcggaacagtagagcggcatatgctggccaatataggcacgggttcgcagcatcccggttgtgggttccagcttataaatcaaaatagcgtgatcgtcttcgcggctggagaagttaatggtttcaccagtggcgatgttcagtgcctcaagatgcggagcggcgatatgaatgatattcaggctagacagcgccttctgcccgacggcaataaatttggtggtcaggcgataactccctgcggcaggcgcggtggtcacatagccgcaggactgtaatccctgcaataagcgatggacggtactcttatttaaaccagccagctcgctaagatgcgccaacggacaaccgtttggatagttgctcaaaatctcaatcagcatcaacccgcgaaacagactctggcttccggctggacgctctttttcctgcgccatctcgttctctttttttcccatcacttctttccccattttgtcgcgtcctgatggtagcgcaaagtgtgccgtagttcacgatctcgacagataatttataaccaattgatttttatgtcttttgaaattcatcaatcagattgccttgttaaaaagtgatcgatatatttgaaatcaagtttcgcatattgaaattttaagccaaaaaagcgatcaaaaaaacaaggaagcctgggatgaaagtgacatttgagcagttaaaagcagcctttaatcgggtcttaattagtcgcggcgttgacagcgaaacggctgacgcctgtgcagagatgttcgcccgcaccaccgaatccggcgtttattctcacggcgttaatcgtttccctcgtttcattcaacaactggaaaacggcgatatcattcctgatgcccaacccaaacgtataaccagcctcggcgcaattgaacagtgggacgcccagcgtagcatcggtaacctgacagcgaaaaagatgatggatcgcgccattgaactggctgccgatcacggtattggtctggtggcactacgtaatgccaaccactggatgcgcggcggcagctacggctggcaggcggcggaaaaaggctatattggcatttgctggaccaactccatcgccgtaatgccgccgtggggcgcaaaagagtgtcgcataggcactaacccgctgatcgtcgccattccttccacgccgatcaccatggtcgatatgagcatgagcatgttctcttacggcatgttagaagttaaccgtctggcaggtcgtcagctcccggtcgatggtggctttgatgatgagggcaatttgaccaaagaacctggcgttatcgagaagaatcgccgcattttgccgatgggctactggaaaggttctggcatgagcattgtgctggatatgatcgctactctcctttccgacggcgcatccgttgccgaagtcacccaggacaacagcgacgaatacggcattagtcaaatttttattgccattgaagtggacaagcttatcgacggtcccacccgcgatgccaagctgcaacgcatcatggattacgttactagtgccgagcgtgctgacgaaaatcaggccattcgcttacccggccatgaatttactaccctgctggccgaaaaccgccgtaacggcatcactgttgatgacagcgtgtgggccaaaatccaggcgttatgaggagataagtcatgatttttggacatatcgcgcagcccaatccgtgccgtttgcccgccgccattgaaaaggcgctcgattttctgcgcgctaccgatttcaacgccctggagccgggcgttgtcgaaatcgacggcaaaaatatttatacgcaaattatcgatttaaccacacgcgaagcggtggtaaaccgtccggaagtgcatcgtcggtatatcgatattcagtttctggcgtggggcgaagagaaaatcggcattgctattgatacgggaaataataaagtcagcgaaagtctattagagcagcgcaatattattttttatcacgacagtgaacatgaaagttttatagaaatgataccgggcagctacgcaattttctttccgcaggatgttcaccgaccaggttgtattatgcaaacagcctctgagatacgaaaaattgtggttaaagtcgcattaacggcgctgaattaatcgaataatcgtctacgccagaacgcctgggtaatgttattgctctaactatattaataattcaggttgctgcacatgcgacttgaattatgacagacatagcctcaaggaatagctatgaaaaaaatactcgaagcaatactggcgattaatctcgccgtactttcctgtattgtatttataaacattattttaagatatggttttcagacaagcattttatctgttgatgaattgagtcgttatttatttgtctggttaacgtttattggcgcgattgtagcttttatggataacgcccacgttcaggtcacctttctggtggagaaactctcccccgcatggcagcgacgagtcgctctggttacccattccttaatcttatttatttgtggcgcactggcctggggcgcaacgctaaaaacaattcaggactggagcgattatagtccgatcctcggtttacccatcggcctgatgtatgccgcttgtctgcccaccagcctcgttatcgcattctttgaactgcgtcatttatatcaactcatcacgcgtagcaattctctaacgagcccaccgcaaggagcttaatcatggctgtgctgatttttctgggctgtctgttgggtggtattgctatcggtttgcctattgcctgggcactgttgttgtgcggggcggcgttaatgttctggctggacatgtttgatgtccagatcatggcacaaacgctggtgaacggagccgatagcttctccctgctggcgattccgttctttgtgctggcgggtgaaatcatgaatgcgggcggcttgagtaaacgcattgttgacctgccgatgaaactggtggggcataaaccaggcgggctgggctacgtcggcgtgctggcagctatgattatggcgagcctttctggttctgccgttgcggataccgccgccgttgccgctctactggtgccgatgatgcgcagcgccaactatccggtcaaccgggcggcggggctgattgcctctggcggcattatcgcgccaattattcccccttccattccgtttattatcttcggcgtttccagcggattatccatcagtaagctgtttatggcgggcattgcccctggcatgatgatgggcgcaacgctgatgcttacctggtggtggcaggccagtcgccttaatttaccccgccagcaaaaagcaacgatgcaggaaatctggcactcttttgtctccggtatctgggcgctgtttcttccagtcatcattattggcgggtttcgctccggcctgtttacccctaccgaagccggggccgttgctgctttctatgcgctgtttgtcgccacagttatttaccgtgaaatgaccttcgccacactttggcatgtactcattggcgcggcgaaaaccaccagtgtggttatgtttctggtggccagcgcacaagtttccgcctggctgattaccattgctgaactgccgatgatggtttctgatttactgcaaccgttggtcgatagtccgcgtctgctgtttatcgtcattatggtggctatcctgattgtcggcatggtcatggatttaacgccgacggtattaattcttaccccggtattaatgcctttagttaaagaggcaggaatcgatccgatttatttcggtgtcatgtttatcattaactgcagtatcggcttaattacaccgcctatcggtaatgtacttaacgttattagtggggtggcaaaactcaaattcgatgatgcagtcagaggcgttttcccttacgtcctggttttatatagtttattagtcgtatttgtttttattcccgatctcatcatcctccctttgaaatggattaattaaaaggaaaatattatgaaattacgctctgtaacctacgcattattcattgctggcctggctgcattcagcacatcttctctggcggcacaatctttacgtttcggttatgaaacaagtcaaaccgacagccaacatattgcggcgaaaaaattcaatgatttattgcaggagagaaccaaaggcgagctgaaattaaaactgttcccggacagcactctcggtaacgcgcaggcgatgatcagcggcgtacgtggcggcaccatcgatatggaaatgtccggcagcaataactttgccgggttaagtccagtgatgaacttgcttgatgtccctttcctgttccgcgataccgctcacgcgcataaaacgctcgacggcaaagtcggtgatgatctgaaagccagtcttgaaggtaaaggactgaaagtactggcctactgggaaaacggctggcgcgatgtcaccaacagccgcgcaccggttaaaacccccgccgacctgaaagggctgaaaatccgcaccaacaatagcccgatgaatatcgccgcattcaaagtctttggcgctaacccgatcccgatgccgtttgccgaagtctataccgggctggaaacccgcactatcgacgctcaggaacacccgatcaacgtcgtctggagtgcaaaatttttcgaagtgcagaagttcctttctctgacgcaccacgcctattccccgcttctggtggtgatcaacaaagcgaagtttgatggcttaagtccggagttccagcaggcgctagttagttctgcacaagaagcgggtaactatcagcgcaaactggttgctgaagatcagcaaaaaatcatcgacggcatgaaagaagcgggcgtggaagtcatcaccgatctcgaccgcaaagcctttagcgacgcactggggaatcaggttcgcgacatgtttgttaaagatgtgccgcagggagctgatctgctgaaagccgtggatgaggtgcaataaaccatgacgcaatactggctggggttagattgtggcggtagctggctgaaagccgggctgtatgaccgcgaaggccgggaggcaggcgtgcagcgcctgccgctgtgcgcattaagcccgcagccaggctgggcagagcgcgatatggcagaactgtggcaatgctgcatggctgtcattcgcgccctgcttactcattctggtgttagcggggaacaaattgtcggtatcggcatctccgcacagggaaagggcttgtttttgctggataaaaacgacaaaccgctcgggaatgctattttgtccagcgaccgccgggcgatggaaatcgttcgtcgctggcaggaagatggcatcccggaaaaactctacccgctgacccgacaaaccttgtggaccgggcatccggtgagcctgttacgctggctgaaagagcacgaaccagaacgctacgcgcaaattggctgcgtgatgatgacgcacgactacctgcgctggtgtttaactggcgtcaaaggctgtgaagagagcaatatttccgagtccaacctctacaacatgagtcttggggaatatgacccgtgcctcaccgactggctggggatcgctgaaatcaatcacgccctgccgcctgttgtcggatctgccgaaatctgcggggagatcaccgctcagacagccgccctgaccggtctgaaagcgggtacgcccgttgttggcggcctgtttgatgtggtttccaccgcactctgcgccgggatcgaagacgaatttaccctcaatgcggtgatggggacctgggcggtgaccagcggcataacccgcggtttacgtgacggtgaagcgcatccgtatgtctatggtcgctacgttaacgatggtgaatttatcgttcacgaagccagccctacctcttccggcaacctcgaatggtttaccgcacagtggggagaaatcagctttgatgagatcaatcaggccgttgccagcttgccgaaggctgggggcgatctctttttcctgccgttcctgtacggcagcaacgccggactcgagatgaccagtggtttctacgggatgcaggccattcacacccgcgcgcacctgttgcaggccatctatgaaggggtggtgttcagccatatgacccacctcaaccgaatgcgcgaacgttttactgatgttcacaccctacgcgtcactggcggcccggcgcactccgatgtctggatgcaaatgctggcggacgtcagcggtctgcgtatcgagctgccgcaggtggaagaaaccggctgctttggtgcggcccttgccgcccgcgtcggcaccggggtttatcacaacttcagcgaagcccaacgtgacttgcgacacccggtgcgcaccctgctgccagatatgaccgcccatcagctttaccaaaaaaaatatcaacgttatcagcatctcattgccgcacttcagggctttcacgcccgcattaaggagcacacattatgagccgaccacttctgcaactggccctcgaccacagtagtcttgaagccgcgcagcgcgacgtgacgctgttaaaagacagcgtcgatatcgtcgaagcgggcaccattctctgtttaaacgaagggcttggcgcggtgaaagccttgcgcgaacagtgcccggacaaaatcatcgttgctgactggaaggtcgccgacgctggtgaaacgctcgcgcaacaggcgtttggcgcaggcgctaactggatgaccatcatctgcgccgcgccgctcgcgacggtagaaaaaggccacgcaatggcacaacgctgcgggggtgaaattcagatagagctgttcggtaactggacgctggacgacgcccgcgactggcatcgtattggcgtgcggcaggccatttatcatcgcggtcgtgatgcacaggccagcgggcaacagtggggcgaagccgatctggcacgcatgaaggcgcttagtgatatcggccttgagctttccattactggcgggattacccctgctgacctgccgctgtttaaagatatccgcgtgaaagcgtttattgccgggcgggcactggcaggcgcggcaaatccggcgcaagtggctggcgatttccatgcgcaaatcgacgctatctggggaggtgcgcgtgcgtaatcatcagttagggatttatgaaaaagcgctggcgaaagatctctcctggccggagcggctggtgctggcaaaaagctgcggttttgattttgtcgaaatgagcgtggatgaaaccgacgaacggctcagtcgtcttgactggagcgccgcacaaaggactagcctggttgccgcgatgatcgaaacaggtgttgggatcccgagcatgtgcctgtccgcacatcgtcgctttccctttggtagccgtgacgaggcagtgcgcgaacgggcgcgggaaatcatgagtaaagcgattcgcctggcgcgcgatctcggcattcgcaccatccagctggcaggttatgacgtctattacgaagaccacgacgaaggcacccggcaacgttttgctgaagggctggcgtgggcagtcgaacaggcggcggcaagtcaagtaatgctggcggtggagattatggataccgcgtttatgaactccatcagcaaatggaaaaaatgggacgagatgctcgccagtccgtggttcaccgtctacccggacgtcggcaacctcagcgcctggggcaatgatgttcccgccgaactgaaactgggcattgaccgtatcgccgcgatccacctgaaagacacccagccagtcaccgggcaaagtcccggacagttccgcgacgtgccgtttggcgaaggctgcgtcgatttcgttggcatcttcaaaacgctgcataaactgaactatcgcggttctttcctgattgagatgtggaccgaaaaagccaaagagccggtgctggagattattcaggcgcggcgttggattgaagcgcgtatgcaggaggctggatttatatgttaacgtaaatgcaggaggctggatttatatgttagagcaactgaaagccgacgtgctggcggcgaatctggcgcttcccgctcaccatctggtgacgttcacctggggcaatgtcagcgcggtagacgaaacgcggcaatggatggtaatcaaaccttccggcgtcgagtacgacgtgatgaccgccgacgatatggtggtggttgagatagccagcggtaaggtggtggaaggcagcaaaaaaccctcttccgatacaccaacgcatctggcgctctaccgtcgctatgccgaaattggcggtattgtgcatacccacagccgccacgccaccatctggagtcaggccgggctggatctccccgcctggggcaccacccacgccgattatttttacggtgccatcccctgcacgcgacagatgaccgcagaggagattaacggcgaatatgaatatcagaccggcgaagtgatcattgaaaccttcgaagaacgtggcaggagtccggcacaaatcccggcggtgctggtgcattctcacggcccgttcgcatggggtaaaaacgccgccgatgccgtgcataacgccgtagtactcgaagaatgcgcctatatgggtctattcagccgccagcttgcgccgcagctccctgcgatgcaaaacgaactgctggataagcactacctgcgtaagcatggggccaatgcctattacgggcagtaatccctcacgccggggcttcatcgccccggcactacgaattgatatgttccttgctgtaacgccgcttccacgctgctggcgttaaaccagtatgtttctgaaaaatctgccggaaatagccaacgtcattaaaccgtattgcatggagcaggccgacaacgtcgagtcactgcataacctgttgctgcccgccgatgcgccatttacgacatttgaaggcaagggattgttcagccataagatcctgattcagacgccaggttcccggtatgaacagagcaatccagagcaacaacctttgtggcattacgacggagcaccagccgcaccgacatccaccggtgaattaaaaacgccagctcaccccggtgacaaaggtaaaactctcattacgatcaatcatcgggctgtcggtaatctcttccggcagctcgctgtatcctgcgctcgccatcaatacgacgtgctctcctatcgggtattttgccgtcaggctgacatagggcacccaggcatcctgcgcggaataacttgccagaccgctacgacgggactcactctcactaatgccatagtaatagtcactgaaattctcgtcataatagagaacgcccagcgcaggtgtcaggctcagacgacctatctgcattttgtggaatacgcttagctcccccacccagccgttgctgttatccagaacgtccgcagctgcagaggctttcacggttccccaacgctcgtggtgataccaggcaacccccgccatagccgtactatcacgcttatcaagctgttgcatggcataatcgtcattatcggtagggtcaaattccagcggcatccaggatgcggtcaggctaagttcatttttttcactttggctcagaataaaacctaacgtggtctgacgaacataaaaagtatcaccttcataactaatcagcggaattgccttcgtattttcattataaccgcgataagggctttcattataagccgcaccagcaccaatggataattcagaagcagttgcgcttgccataaaaggcaacgcaaataacgccacaatattgcgattaattaacatgtccggtattccattttaaaataagataaaaaagagtcggcataataatgcttacaatttctccggtgcaagattcatatttatatagtaatatataaaattatatataattgggctgttgcgatgacaaaattacaacttaagtaccgggagttaaaaattatcagcgtaatcgctgccagtgaaaatatcagccatgccgcgactgtacttggcatcgcacaggccaacgtcagcaaatatcttgctgattttgaaagtaaagtgggtttaaaagtctttgaccgaaccacccggcagctgatgctcacaccttttggcaccgcgctgttaccgtacatcaacgacatgctggacagaaacgagcaacttaataattttattgcagattataagcatgagaaacgtggtcgggtcaccatctacgccccaaccggcataattacctatttatccaaacatgtaatcgataaaattaaagatatcggtgatatcaccttaagcctaaaaacctgcaatcttgagcgtaatgccttttatgaaggcgtcgaatttcctgatgattgtgatgttttaatcagctacgctccaccaaaagatgaaagcctggttgccagttttattacccaatatgccgtaaccgcttatgccagccagcgctatcttgagaaacatcccattagccgtcctgacgaactcgaacatcactcctgtattttgatcgacagcatgatgatcgacgacgcgaatatctggcgcttcaacgtcgccgggagtaaagaggtgcgggattatcgcgtgaagggaaattacgtttgcgacaacacgcaatctgcgctggagctggcacgaaatcacctggggattgtgtttgcgccagacaaaagtgtgcagagcgacctgcaagacggcacgctggtgccctgctttcagcaaccctatgaatggtggctggatctggtggctatcttccgtaaacgggaataccagccctggcgggtccagtatgtgctggatgaaatgctgcgtgaaattcgccaccagcttgctcagagccagcaactgcggcctgaacaagcggcggaaagcgaagattaatgatcgagataaaggtaatgcacccagctggtcatgcgtaatagcactttgcgcatcacgctgacatggctgaaatgatcagagtaaaccgccacctgggcgtaaataccgtctggtaaagcgctcaaatcagtgtgctcatccagttcaatggtcgcgataacgccatcactacccggcgctgtgtttaacgtctgtaaggtgccggtgctctgataagctccgccgggaacggctggactaatggctgccagcttaccgctgaataccttacctggcagagcattaaacaccacttccgcatcgtcgccaggagccagtcgcagcaaggagttctgacggaactgcgccacgatttgtcgtttctgatcgggtataaacaccatcaccggacgtagcggcaggctcgcggcataggtacccggacgaatcagtacctgggtcacataaccatcgctcggcgcacgcactatcgtctgctcaaggttatattttgcttccgcgagctgtgctttcaggctggcgatttgagaatgttcacccaacaccaggctatccagctggctctggatctgtttttgttccgccgcgctactcttcacggaggcttcctgcgccagataattttgccgcgccacatcgatatcgcgttcactaaacgggtttactttcgcctggctgccacgtgcgtaacgctgatactctttagcgaatttatcccgcgtggcctttgcctgctgagtattcgccgccatctcatctaactctgcgcccaacgcccgctgtttatgttctgcggtaacgatatccgccatcagccgatccacccgcgcctgataacgcgtcgggtccagtcgaaatagcacctcaccttttttaatcagcgtatttttcttatccgtcacttcaatcaccacaccagtcacctgtgggacaacaggaatagaaataaccgctttttgcgctttaaaggtatacggatggttatagttcattaacagaattagaccgctgacaataaatattccacccagggccgctgtgggaatggtccatttatttacgggaattttgaagatcttaaacattgcccatgcaaaagccacataggtcaaaataatcagtaaatccataagtattactcggcagaagaggatttgatgtcggcgagctgtttctccagcccggcaatgcgctgttgcagttgcataacggaactatcatggctttgcattccccatccccgctccgggcggtaaagcgtggcccaaatccacaaaaacggccagataacatgtaacgtaaaaagactcacccaaccagcaacatgaatggcgtcggcatgaggatgattacgttttttggcaatcaggtagggaatatcatgtaaaataatgatcccatagaagatcaccagaaatacaaaaataagcactcccagtgcaaaatagtccaggaacatatttccctcaaagaatataaaaaagaacaattaacgcatattatgaaatgccatgatgcagtgcaatttccttatttatataacgacatattgttttttatatactttcttaaatgtgctgtctggtttttcaacaggacgaggtttatcatattgaaatagtggaactattggccaaactaatgaataactccagtaaaacatccacagtacagattaagcgtattaaaccttcaattatctaccgtttattgctgattggcctcggatcaccaatggtgatttacggcctggttcgcccgctcaccatcgaaacgcgagattaaactcctgacaaaacacgccccagaaacgtacttctgttggcgtagtctgggttattgcgcacgtaggtttaaaacgtaaattgtaacaacgtgcgctttgtttatgccggatgcggcgtgtacgccttatccggcctacggtcaggttcccgtaggcatgataagacgcgtaagcgtcgcatcaggcaatgaatacccaatgcgaccagcttcttatatcagaacagccccaacggtttatcgctgtagctcaccagcaggcacttggtttgctggtaatgctccagcatcatcttgtgggtttcgcgaccgataccactttgtttgtagccaccaaacgccgcatgtgccgggtaagcgtgataacagttggtccacacgcgcccagcctgtatgccgcgccccatcttataggccagattaccgttgcggctccagacgcccgcgcccaggccatattgcgtatcgttcgccagctccagcgcttcttccatcgttttgaaggtggtcaccgccagcaccgggccaaaaatctcctcctggaacacccgcatattgttctgaccaaacagaatcgtcggttcgaggtagtagccgtctttcagttcaccttccagcagcttgcgccgcccgcctgtgagcacgtcagcgccctcttttttaccgatatcaatgtagttgaggatggtttccagttgcccgtgagaaacctgcgcgcccatttgcgtcacgctgtcgagcgggttaccgctacgaatgctttcgacacggcggatggcgcgttccataaagcgttcgtagatagattcctgcactaaagcacgactcggacaggtgcaaacttcgccctggttaaaggcaaacagtgcaaagccttccagcgctttatcgaaaaaggcatcttcttcatccatcacatcagcaaagaagatatttgggctcttaccgcccaactccagcgtcaccggaataatgttttgcgttgcgtattgcataatttgttggcccacttccgtactgccggtaaacgccactttggcgatgcgtttgctggtcgccagatattcgccaattaccccacctgcgccattgaccacgttcaccacgcccggcggcagtaaatcaccgacaatttccattagcagcagtacagaaagcggggtaagacgtgcgggtttcagcaccacacagttgcccgccgccagcgcgggagccattttccagctcgccatcagcagcgggaagttccacgggataatctgccccaccacgcctaacggttcatggaaatgataggccacggtttcgctatcaacttcactgatcccaccttcctgcgcccgaatacagctggcgaaatagcggaaatggtcaatcgccagcggtacatccgcagcactggtttcgcgaatgggtttgccgttatcccaggtttcagctgtcgctaacagctcgaggttttgttccattcgatcggcaatcttaaacagaatcgccgcacgatcctgcacgctggtgtgcgcccatttatctttcactttgtgcgcagcatccagcgccagatcgatgtctcgtttgccgctagacgccacttcgcacagcagctgcccggtcaccggcgtcagattctggtaatactcgccgtcggcaggggctacccattcgccgccaataaagttgtcatagcgggcttttaacttgagggggaaaccatactcgccgggcttaatctgtgcactagggggattattggtcatgatcgtctccttgcggtgtgaggtataacaagggtagacgtgactggcgaaatcttcgccagtcggtaacagctttacgacagctatcacgaatttacgggcaagggttacagagatagttgaaaaagcggctaacaatttgccagccgttgtggaaatgatgattacatcgctgcgcgataaatcgccacaatttcttcgtgagttgcctggatcgggttagtaaagccacaggcatctttcagggcattagtcgccaataccgcgaaatcttcttctttcacgttcaggtcgcgtaggcctgccgggatatccactttcttcgccagttcacggatggcgttaatgcaggcttcagcaccttccgcgtcgtttttacctgtcacgttcacgcccattgcagcggcacagtcacgcagacgtgcagcggcgactttgctgttgaatacctgaacgtgcggcagcaaaacggcgttacatacaccgtgtggcaggttgtagaaaccgcccagctggtgcgccatcgcatgaacataacccagagaagcattattgaacgccataccggcgaggaactgggcataagccattgcttcacgcgctttcgcattactgccatcttcaacggctaacggcaggttttcggcaatcatggtcacggctttcagtgcacaagcgtcagtgatcggcgtggcggcaatagaaacatatgcttcgatagcgtgcgttaaggcatccatacccgttgcggcggtcagactcttcggcataccaatcatcagagaggagtcattgacagaaagcagcggagtgacatgtttatcaacaatcgccattttgatatgacgcgcttcgtcagtgatgatgcagaaacgggtcatttcagaggccgtacccgccgtggtattgatggcgatcatcggcagctgcggttttgcagagcggtcaacgccttcgtaatcgcgaatatcgccgccattggctgccaccagcgcaataccttttgcgcagtcgtgtggagaaccaccgcctaaggagatcacgctatcgcaattattctctttaagtaatttcaaacctgcggcgacgttttccgtggtggggttaggttgggtgccatcataaataacgctaaaaatattgcgttcttccagtgctttttgcacatcgcccgccatacctaatttcgttaacatattgtcagtgacaattaaggtacgggtaaatccataatctgccatcatattcattgcatcagtcaaactatcagcgccgatgacattcacagaaggaataaagaacgtactagctgccataacacactcctgaaagtgtaaaaaagggcgggcagcttactgaggattttcattcgaaaatatgatcagtattattgattatcaaaattaatctaataaaaagcacattgtattcattaaacaatgtgctttttttaaattcataagaattttgtattaatttattttaaaacttaattaatcatttccttatttttccggaaataataatgcgtcgcgcaataaatgatcatttccacgacgacgcgtaaagccaatgcggtcaaaatattccagaatctgaattgccagctttcggcctacgcctaagcgatcgcggaaatccgccgcgcaggtactaccacactcctgatcgagatcgcggatcatattggcaaactcgacaatccgatcgttacggtaataacgatctttaacgatcgcggtaattattccttgctgcgccgcctggcgtagagtcaggcgcattgcctgctcgtcggttcccgtctcttttgccaggtcacgcacccaccacggttcgtcaccaaacagtggctctgctttttgccagatggcctgctgctcttcgctgaagcccgctttgtgatctggcagatgcagccagccgtgatggctgtggatgtcgccgctttcgcgcatcttttcaatcagcaacagtaccagcgcttcatcttccattggcaacgccatacgtcgcagacgttcgcgcccagggccaggttcatcgcgatgttgctcatgataagtcgctaatgtgtcgagaattttccgctgccagcgggcggcaaccggcgcattcaacaagctataaccagcctgaatataaccaggctgttgcagcaattcgcgcatcccttcgccgttgagctggcgcgcccaggcgaaatccgcaaggttaaccgcgccgcgttccagatgaacagataacgcatcggcatcgctctgcgcccgtgcaagagacgccagccattgcagatattccggcttacgtttaccgcgacgcggcgggttaagcatcacgacgcgcgctccggccagcgtgttgcgggcagagatatcgcgcaataccaggcggtcgttatctgccagccataacggggtgtcgaagaccagttcagcaaggttatcttccagcagactaacgcgtcccgtgacgtggctggcggcgtggtgaatatgcagcggctgccactgggtcagcggtgtatgggtttgaagctcgacaatcacccgtgtgaacggctctggcggcacatcggcaagcagccagtcgccacggttaatctgctctttttccgcatcacccgcgatgttaagcgcgatacgctgcccggcattggcggtttctgttggctggttttgcgcatgcagcgcacgtacacgcatcggtttatttacaccagtcagccagagactatcgcctaccttcacttccccgcttaacgccgtaccggtgacgaccagcccggcaccttttacggtaaatgcgcggtcaatcgcgaggcggaaactatgttggctggcgtgctcgcgttccggcaactgaagcagatgctcgcgcagggcatccattccccgaccttcggttgctgcggtgataaacagttttgcctcagcaaaaccgtattcccgcagaacctcctttacctggcgttcaacctcatcaacacgcgcttcgtccacgcgatcggctttggtcagcgccactgtcagcatcgggttaccggtcagctgcaaaatcgccagatgctcacgggtctgtgccatcacgccgtcatcgcacgccaccaccaacagcgcgtgatcgataccaccaacgcccgccagcatgttggaaagaaacttttcatgaccgggaacgtcgataaaaccaggcacgcgaccatccggctgcggccagtaggcatagccgagatcgatggtcatgccgcgctttttttcttccggcagacggtcagcatttacgccagtaatcgcctgcaataaggttgttttgccgtggtcaacgtgtccggcagtcgcaataatcatttcaacaacatctccaaaaaccgttgctcatcttcaaggcagcgtaaatccagccacaatcgtccgtcataaatacgaccaatcaccggcactggcaattcacgccagcgggcggctaaactctcaaggtggctaccgcgtccatcatggggtgtaaacgttaatgccgcgctcggcaggcgatcaaccggcaggctaccactgccaatctggctaagacatggcataacctgtaccgcaaactccgcgccgtaatgtgcggcaaggggggcctgtaaacgttgtgcctggatttgaatgacctctgcgctgcgggtaagcaggcgcagggtcggtaatttttcactcagagcttcagggtgtaaataaagacgcaacgtggcttccagcgccgcgagggtcattttatccgcgcgtaatgcacgcttcagcgggtggctttgcaggcgggcgatcatctcttttttaccaacaataattcctgcctgcggcccgcctaacaacttgtcgccggagaaactcaccagactgacgcccgccgcaatcaactcctgcggcattggctctttcggcaaaccgtactggctaagatcgaccaggctgccactgcctaaatcagtcactacgggaacatccagctctttgccgagcgccaccagttccgcttcatctatcgctttggtgaacccctgaatgctgtagttactggtatgtactttcatcaacagtgcggtattttcattcaccgcctgacgataatcattcgcgtgcgtgcggttggtggtccctacttcgtgtagggtgcagcctgcctgacgcataacatcgggaatacgaaacgcgccgccaatctccaccagttcgccgcgagataccaccacctcttttccgctggcagtggccgccaacatcaataacaccgccgccgcattgttattgacgatacaggcatcttccgcccccgtaatacggcacagcagctgcgccagcgcccgatcgcgatgtccgcgtccggcgtcgtccagatcatactcgagggtcactgggctacgcatagcctgcgcaacggcttccaccgcggcttccgcctgtaaagctcgcccaaggttggtatgcagcacggttcccgtcaggttgatcaccggacgcagcgcgctctgcgcttctttcgtcaaccgggcatcgacttcttgcgcccagttttcacaccacgcaggcagcgtctggctgccacgaatcacttctcgcgcttcgtcgagcatctgacgcaacaattccaccacgcgggtgtgaccataagtatcacgcaaagaaaggaaggagctatcgcgcaataagcgatcaatagccggaagttgactatagagggaacgcgtttcggttgtcataggaaacctggctgatcaaggccctctcacacggagaagggcgtttaacataaccacggattgtaacgtgagatgggtcaggaggacatatcgcgcatcaagcctttggcggttcggtgcgagcaaaactttcgcggctaaacaggttttcgaccagtttgactaagtgtgggcggtcgacacaccaacctggcgcaacgcggcggaaattgagatatccgacggcacaggcaatggcgatagtcgccagattgaccgtatcggttttgagtgtgccatcgaccagatatccttccagcacatccagactgcggttgattttctcccgctggcgtaacaattcatcttcagactgctgcgccgctggacgcgcctgttcacgcacgcttaccagcccggcatccataatgccatccgccagtgcctcaattttgcgcacccgcaagctctccagcggatcgcgcggcaacatcgccggagcgacattcattaattcaatatattcagcgatgatcgggctatcaaaccagcattcgccctcttcggtcaccagcaccggcacttttcctaacgggttaaattgcgccacgccgttgtccgcgttatagggcagttcattaataaattcgaaagttatgcccttttctaacaacagaatagaaagtttgcgtacaaacgggctggtgtagctaccgacgagtttcatgccgagtcctttgtgcgaggaaaaatatcagtatggctcaatgatccaaataaagataatgcatccagctggtcattcttagcagcactttccgcatcacgctaacatggctgaaatggtcggagtaaaccgccacctgggcgtagatgccgtcgggtaaggcatcgatatcatcgttagggtccagttcaatggttcccagcacaccgtccgtgccgggcacgaccgttaaactttgcaataccccctgcgcctgataagaaccgcctggcacgacaggtaaaatactagtcagtttgccgtgaaacacctgcccaggtagcgcgttaaacaccacttccgcatcatcgccaggtttcagacgtaacaggctgttttgccgaaattgggcgacaatttgccgtttttgctcggggatgaagaccatcaccggacgcagcggcaaggcagctgcgtatgtacctgggcggatcagtacctgagtaacgtagccattgctcggcgcgcgaatgacagtctgctcaaggttatattttgcttcagtaagttgcgctcttaagctcacaatctggctttgctcgccgttaaccatactgtcgagctggctctggatctgcgcctgctccgccacgctgcctttcaccagcgcatcctgcgcgaggaaattttgccgcgcatcgtcgatgtcacgttcgctgaacggattcaccgccgcctggctgcctttcaagtaacgttgataatttttaaacagacggtcgcgctccgcactaacctgggtggtgttggcctgcgcttcagtgagctgcgcacgcagcgtctttatattatgcgtcgccgtcatcaggtcagcctgaagtctgtcaactcgcgcctggtaacgaaccgggtcgagcttaaaaagcacctcgcccttttgaataagctgattattcttgtcagtgacttcagtaacaattcccgtcacctgtggcgtgatagggatcgctatcactgccttttgcgcggtaaaagtgtaagggtggttgtagttcatcaacaaaatcaaaccactcaccagaaacacgcctcccagcgccgccgtcgccagcgtccactgatttaccggaatgcggaagattttaaagaccgcccacgccagcgccacgtaagttaaaacaatcaatagatccataattagatctccgggaacgtggaatagtcagtctttttctcggcggcgagttgatgctccaaccgggaaattcggtcagaaagtgcggcgatttccgggtcagtcgctttctcctggctcgcaacatgactctgcataccccagccacgctccggttgatagagcgtcgcccagatccacagaaacggccagataacatgcagagtaaacaggctcacccagcccgccgtatgaatagcgtcggcatggggatggttgcgctttttggcaatcagataagggatgtcatgtatcgcgatgattccataaaaaatcaccagaaagacgaagatcagcactcccaacgcgaaatagtttagaaacatatctgcctcggattcacgtttatcagtgttgtttttgggctggcagccagaagggagtcaggctgatattttgacaataatccgggttcgcgattctcgccataacaccaaagaataatttttagaggtgatgagttgcttagttacataacgattgtatgacgaaggcataacatgctgtagatcacatcaggtgaacgccgtaagaaaatatcttgtgattcagatcacaaagattcaacaaaccatcaaaacaaaaatgtgacactactcacatttaaatgccatttttagcgaaaatcgccgccttgttgcttttttacacaagcgttttgtgatgaacgtcacgtcaattacctctctaccccctatatttatgtgattgatatcacacaaaaggccgtcgactggacagttaaccgattcagtgccagatttcgcagtatctacaaggtccggctacctctgccgccacattaacaaaaaacctcgggcttccagcctgcgcgacagcaaacataagaaggggtgtttttatgagttccgatattaagatcaaagtgcaaagctttggtcgtttcctcagcaacatggtgatgccaaatatcggcgcgtttatcgcgtggggtatcatcaccgcgttatttattccaacagggtggttaccgaacgagacgctggcgaagctggtcgggccgatgatcacttatctcctgccgctgctgatcggttataccggtggtaagctggtaggcggcgaacgtggcggcgtagtcggtgccatcaccaccatgggcgttatcgtcggcgcagacatgccgatgttcctcggttctatgattgcaggtccgctgggcggctggtgcattaagcacttcgaccgctgggtagacggtaagatcaaatccggttttgagatgctggtgaataacttctccgcaggcatcatcgggatgatcctcgctattctggcattcctcggcattggcccgattgttgaagccctgtccaaaatgctggctgcgggcgttaacttcatggttgtccatgacatgctgccgctggcgtctatctttgttgaaccggcgaaaatcctgttcctcaacaacgccattaaccacggtatcttcagcccgctgggtattcagcagtcccatgaactgggtaaaagtatcttcttcctgattgaagctaacccaggtccaggtatgggcgtgctgctggcgtacatgttctttggtcgtggtagcgctaaacagtctgcgggcggtgcggcaatcatccacttcctggggggtatccacgaaatctacttcccgtatgtgctgatgaatccgcgtctgatcctcgcagtcatcctcggcggtatgactggcgtgttcacgctgactatcctgggcggtggtctggtttctccggcatctccgggttctatccttgctgtactggcgatgacaccaaaaggtgcttacttcgctaacatcgcgggtgtgtgtgcggcgatggctgtctccttcgttgtctctgctattttgctgaaaaccagcaaagtgaaagaagaagatgatattgaagcagcaactcgtcgtatgcaggacatgaaagctgagtctaaaggcgcatctccgctgtctgctggcgatgtgactaacgacctgagccacgtacgtaaaatcatcgttgcctgtgacgccggtatgggttccagtgcgatgggcgcaggcgttctgcgtaagaaaattcaggatgcaggtctgagccagatttctgttactaacagcgcgatcaacaacctgccgccagatgtggacctcgtcatcactcaccgtgacctgaccgaacgcgctatgcgccaggttccgcaggcacagcatattagcctgaccaacttcctcgacagcggcctgtacaccagcctgaccgaacgtctggttgctgcccaacgccacacggcaaacgaagagaaagtaaaagacagcctgaaagacagctttgacgattccagtgctaacctgttcaagctaggcgcggagaacatcttcctcggtcgcaaagcggcaaccaaagaagaagcgattcgttttgctggcgagcagctggtgaaaggcggttacgttgagccggaatacgttcaggcgatgctggatcgtgaaaaactgaccccgacttatctgggtgagtctatcgcggtgccacacggtacggttgaagcgaaagatcgcgtactgaaaacgggcgtcgtgttctgccagtacccggaaggcgtgcgcttcggtgaagaagaagatgacattgcccgtctggtgattggtattgctgcccgtaacaacgagcacattcaggttatcaccagcctgaccaatgcactggatgatgagtccgtcatcgagcgtctggcacacaccaccagcgtggatgaagtgctggaactgctggcaggtcgtaagtaatccaatcccaccctctccacatggagaaggtggggttaattgcctgatgcgctacgcttatcaggcctacaggatgcatcacaatttgttgaatttgcacgttcttgtaggccggataaggcgcttacgccgcatccggcgctgcccctctcctcacggagagggtttgggtgagggaaaagcctcaccccagccctctcgggtaaaaacattgatgaaggttaatactatgaaagcattacattttggcgcaggtaatatcggtcgtggctttatcggtaaactgctggcagacgcgggtatccaactgacgtttgccgatgtcaatcaggtggtacttgatgccctgaatgcccgtcatagctatcaggtacatgtggttggtgaaaccgagcaggtagataccgtttccggcgtcaatgctgtcagcagcattggtgatgatgtcgttgatctgattgctcaggttgatttagtcactaccgccgttggcccggttgtgctggaacgtattgctccggcaatcgccaaagggcaggtgaaacgtaaagaacaaggtaatgaatccccgctgaacatcatcgcctgtgaaaacatggtacgcggtaccacgcagctgaaaggccatgtgatgaacgccctgccggaagacgccaaagcgtgggtagaagaacacgttggctttgtcgattccgccgttgaccgcatcgtaccgcctagcgctagcgcaactaacgatccgctggaagtgacggtagaaaccttcagcgaatggattgtcgataaaacgcagttcaaaggcgcactgccgaacatcccaggcatggagttaaccgacaacctgatggcatttgtcgaacgtaaactcttcaccctgaacacgggtcatgctataaccgcgtacctcggaaaactggccggtcatcagaccattcgtgacgcgattctcgacgagaaaatccgcgcggtggtaaaaggtgcgatggaagaaagtggtgcagtattgatcaagcgctacggctttgacgctgacaagcatgcggcgtacatccagaaaattctcggccgttttgagaacccgtatctgaaagatgatgtagagcgcgtaggccgtcagccactgcgtaaactgagtgctggcgaccgtctgatcaagccactgctcggtacgctggaatatggtctgccacataaaaacctgattgaaggtattgccgctgcaatgcacttccgcagtgaagatgatccgcaggctcaggaactggcagcactgatcgctgacaaaggtccgcaggcggcgctggcacagatttccggtcttgatgccaacagcgaggttgtatccgaggcggtaaccgcttataaagcaatgcaataatggtggaccaggcgcaggacaccctgcgcccgaataacagattgagtgatatgcaggcaacaatggaacaaacccaggcctttgaaaaccgtgtgcttgagcgtctgaatgctggcaaaaccgtgcgaagctttctgatcaccgccgtcgagctcctgaccgaggcggtaaatcttctggtgcttcaggtattccgcaaagacgattacgcggtgaagtatgctgtagaaccgttactcgacggcgatggtccgctgggcgatctttctgtgcgtttaaaactcatttacgggttgggcgtcattaaccgccaggaatacgaagatgcggaactgctgatggcattgcgtgaagagctaaatcacgacggcaacgagtacgcctttaccgacgacgaaatccttggaccctttggtgaactgcactgcgtggcggcgttaccaccgccgccacagtttgaaccagcagactccagtttgtatgcaatgcaaattcagcgctatcaacaggctgtgcgaagtacaatggtccttagtctgactgagctgatttccaaaatcagcttaaaaaaagcctttcaaaagtaagcaacgtctgcttactgcccctctacctgcttcggccgataaagccgacgataatactccagacgttgtagatataacggcacgctttcatcgggtattccggacggaatcgcgttacggggaggaagttttttcagatactcccggaacgcctggctacttgccatgaaatctacggctttatcgataagaagcggaacgttttcacctaatttgcccatgatgatatctccgtattaccccgcgccgggaatgcgcggccgccaattttagtttaggttcccggtaaagatgacattaaggaaaacgtgctgaatcctcaataatcatccgctgctgtttattatcttttttctatagatttcttaattaatcaacgaattgcgcagtttttgagcatgttaatgattacgttacagaactattacaatgtcattagttgtgaacaaagcacctggtcgcgcatactaggggctataaatttatctttatcagaagccatcacatgaaagaagtcgaaaaaaacgaaatcaaacgcctcagcgatcgcctggacgccatccgccaccagcaggccgatcttagcctggttgaagccgcagacaaatatgccgagctggaaaaagagaaagccacgctggaagcagaaattgctcgcctgcgtgaagttcatagccaaaaactgagtaaagaagcacagaagctgatgaagatgccattccagcgcgcaattaccaaaaaagagcaggctgatatgggcaagctgaagaaaagtgttcgcggactggtcgttgtgcacccaatgaccgcactgggccgcgaaatgggcctgcaggagatgactgggtttagtaagaccgcgttttaagaacacagtatctacagggtgattctgcacattcctataggccgagtaaggtgttcacgccgcatccggcaagataaggcgctctggatcaacaacctaagggcaattctctgatgaggattgcccttttctttaccagacatctccccccacaagaattggccctaccaattcttcgcttatctgacctctggttcacaatttcccaattaaaactcacatcaatgttgccaatacataacatttagttaaccattcattgtcattatccctacacaacacaattggcagtgccacttttacacaacgtgtgacaaggagatgagcaacagactcattacacgatgtgcgtggactccaggagacctgcaatgaatctctggcaacaaaactacgatcccgccgggaatatctggctttccagtctgatagcaagccttcccatcctgtttttcttctttgcgctgattaagctcaaactgaaaggatacgtcgccgccagctggacggtggcaatcgcccttgccgtggctttgctgttctataaaatgccggtcgctaacgcgctggccagcgtggtttatggtttcttctacgggttgtggcccatcgcgtggatcattattgcagcggtgttcgtctataagatcagcgtgaaaaccgggcagtttgacatcattcgcagctctattcttagcataacccctgaccagcgtctgcaaatgctgatcgtcggtttctgtttcggcgcgttccttgaaggagccgcaggctttggcgcaccggtagcaattaccgccgcattgctggtcggcctgggttttaaaccgctgtacgccgccgggctgtgcctgattgttaacaccgcgccagtggcatttggtgcgatgggcattccaatcctggttgccggacaggtaacaggtatcgacagctttgagattggtcagatggtggggcggcagctaccgtttatgaccattatcgtgctgttctggatcatggcgattatggacggctggcgcggtatcaaagagacgtggcctgcggtcgtggttgcgggcggcagctttgccatcgctcagtaccttagctctaacttcattgggccggagctgccggacattatctctagcctggtaagtctgctctgcctgacgctgttcctcaaacgctggcagccagtgcgtgtattccgttttggtgatttgggggcgagtcaggttgatatgacgctggcccacaccggttacactgcgggtcaggtgttacgtgcctggacaccgttcctgttcctgacagctaccgtaacactgtggagtatcccgccgtttaaagccctgttcgcaagcggtggcgcgctgtatgagtgggtgatcaatattccggtgccgtacctcgataaactggttgcccgtatgccgccagtggtcagcgaggctacagcctatgccgccgtgtttaagtttgactggttctctgccaccggcaccgccattctgtttgctgcactgctcagcattgtctggctgaagatgaaaccgtctgacgctatcagcaccttcggcagcacgctgaaagaactggctctgcccatctactccatcggtatggtgctggcattcgcctttattagcaactattccggactgagtagtacactggcgctggcactggcgcacaccggtcatgcattcaccttcttcagcccgttcctcggctggctgggggtattcctgaccgggagcgataccagttctaacgccctgttcgccgcgctgcaagccaccgcagcacaacaaattggcgtctctgatctgttgctggttgccgccaataccaccggtggcgtcaccggtaagatgatctccccgcaatctatcgctatcgcctgtgcggcggtaggcctggtgggcaaagagtctgatttgttccgctttactgtcaaacacagcctgatcttcacctgtatagtgggcgtgatcaccacgcttcaggcttatgtcttaacgtggatgattccttaatgattgttttacccagacgcctgagtgacgaggttgccgatcgtgtgcgggcgctgattgatgaaaaaaacctggaagcgggcatgaagttgcccgctgagcgccaactggcgatgcaactcggcgtaagtcgtaatagtctgcgcgaggcgctggcaaaactggtgagtgaaggcgtgctgctcagtcgacgcggcggcgggacgtttattcgctggcgtcatgacacatggagcgagcaaaacatcgtccagccgctaaaaacactgatggccgatgatccggattacagtttcgatattctggaagcccgctacgccattgaagccagcaccgcatggcatgcggcaatgcgcgccacacctggcgacaaagaaaagattcagctttgctttgaagcaacgctaagtgaagacccggatatcgccagtcaagcggacgttcgttttcatctggcgattgccgaagccagtcataacatcgtgctgctgcaaaccatgcgcggtttcttcgatgtcctgcaatccagtgtgaagcatagccgtcagcggatgtatctggtgccaccggtttttagtcaactgaccgaacaacatcaggctgtcattgacgccatttttgccggtgatgctgacggggcgcgtaaagcaatgatggcgcaccttagttttgttcacaccaccatgaaacgattcgatgaagatcaggctcgccacgcacggattacccgcctgcccggtgagcataatgagcatagcagggagaaaaacgcatgattatttccgcagccagcgattatcgcgccgcagcgcaacgcattctgccgccgttcctgttccactatatggatggtggtgcatattctgaatacacgctgcgccgcaacgtggaagatttgagtgaagtggcgctgcgccagcgtattctgaaaaacatgtccgacttaagcctggaaacgacgctgtttaatgagaaattgagcatgccggtggcactggctccggtgggtttgtgtggcatgtatgcgcgtcgtggcgaagttcaggcagccaaagcggcggacgcgcatggtattccgtttactctcagcacggtttccgtttgcccgattgaagaagtcgcgccagccatcaagcgcccaatgtggttccagctttatgtactgcgcgatcgcggctttatgcgtaacgcgctggagcgagcaaaagcagcgggttgtagcacgctggttttcaccgtggatatgccgacaccgggcgcacgctaccgtgatgcgcatagtggtatgagcggcccgaacgcggcaatgcgccgctacttgcaagcggtgacacatccgcaatgggcgtgggatgtgggcctgaacggtcgtccacatgatttaggtaatatcagtgcttatctcggcaaaccgaccggactggaagattacatcggctggctggggaataacttcgatccgtccatcagttggaaagaccttgaatggatccgcgatttctgggatggcccgatggtgatcaaagggatcctcgatccggaagatgcgcgcgatgcagtacgttttggtgctgatggaattgtggtttctaaccacggtggccgccagctggacggtgtactctcttccgcccgtgcactgcctgctattgcagatgcggtgaaaggtgatatagccattctggcggatagcggaattcgtaacgggcttgatgtcgtgcgtatgattgcgctcggtgccgacaccgtactgctgggtcgtgctttcttgtatgcgctggcaacagcgggccaggcgggtgtagctaacctgctaaatctgatcgaaaaagagatgaaagtggcgatgacgctgactggcgcgaaaagcatcagcgaaattacgcaagatagcctggtgcaggggctgggtaaagagttgcctgcggcactggctcccatggcgaaagggaatgcggcataatcgtttgcgccccctcaccctaaccctctccctcagggagaggggaccgttcggcgctgtatgtactccctcactctgaaacgacaccgcactctttttttctccctcgcccctccggggagagggccggggtgaggggaaaaggccgcactgctcaccaattttctgctatcctgcccccgcactaagggggcagtatgctaaacatcgtactttacgaaccagaaattccgccaaatactggcaacatcatccgtctttgcgctaataccggctttcgtctgcatatcatcgaaccgatgggatttgcctgggacgataagcgcctgcgccgcgcggggctggactatcacgagtttaccgccgttacgcgtcatcatgactatcgcgcgttcctcgaagcagaaaatccccagcgcctgttcgccctcaccacgaaaggtacacctgctcacagcgccgtaagctatcaggatggcgattatctgatgttcggcccggaaacacgcggcctgccagcgagcattcttgatgccctgcccgctgaacaaaaaattcgcattccgatggtgccggacagccgcagcatgaatctgtccaatgcggtgagcgtagtggtgtatgaagcctggcggcagttggggtatccgggagcggtattgagagattaattactgtaggccggatagatgattacatcgcatccggcacgatcacaggacattagatcccatccccatactcaaatgtatggttaataccgttgaaatgctggtccatatccatacttggcttatcgctgtctggtttaccgacaatacgagccggaacgccagcggcggtggtatgcggcggcaccggttgcagcaccacggaacctgcgccaatcttcgcgccgcgcccaacttcaatattgccgaggattttcgcgcccgcgccaatcatcacaccttcacgaattttcgggtgacggtcaccaccagatttacccgtaccgccaagcgtcacagattgcagaatgcttacgtcgttttcaatcaccgccgtttcaccaacgacgatgcctgtcgcgtggtcaagcatgataccgcgaccaatttttgctgccgggtgaatatcgacctggaacgtcacagaaacctggttttgcagaaagattgccagtgcgcgacgcccctgattccacaaccagtgaccgatgcgataggcctgcaaggcatgaaaacccttcaggtataacaacggggtactgtatttatcgactgccgggtcgcgggtacgcaccgcctgaatatcacaggccgcagaggcgatcatttccgggtcagcggcgtaggcttcttccaccacttcacggatagcaatagcaggcataattgggctactcagcttgttcgccagcatgtagctcagtgcactgccaaggttttcgtgcttgagtagcgtcgcgtggtaaaaactggccagcattggctcacagtccgccagcgttctggcttcggctttaatattgttccagacaatttccagttcttcacagctcattgcttactccacacgatgagataatgaccggcccgttctgcgcgggccgggtcatagcggtaacaaaggttccctggggttagtggctgctgcgctcgtccttgcgtgcacgacctagtaaagtcaatgctgcctcgcgcgcgttttttccgcaatataatacttgataaatttcctcggttattggcatttcaacgccgaagcgatgcgccagttcgcggacttctttcgtattgcggtagccttccaccacctgaccaatcttctcctgcgcgctttgtacatccatgccctgaccgagcatcatgccaaaacggcggttacggctctggttgtcggtacaggtaagcaccagatcgccaagccccgccatgcccataaaggtggcagggtcggcacccagcgccgcaccaagacggctcatttcagccagcccacgggtgatcagcgccgtacgcgcattcgcaccaaaaccgataccgtcggacatccccgcaccaatggcaataacgtttttcaccgcgccgccaagctgcacgccaatgaaatccggattgctgtaaacgcggaaacttttgccgcagtgcagcagctgctggagatcatcggcaaaggtctgatcggtgctggccaggctaatagctgtcggtaaacctgccgccagttctttcgcaaacgttgggccagagataaccgccagcggaatttgatcgcctaaggcctcacgcgccacgtcctgtaacagacgtccggtttccgcttccagccctttggtcgcccacaccagacgcgcatcaggacgcatcagtggtttaatctggcgcagcacttcaccaaagacatggctgggtacgacgacgagaatattacggctggctgccagcgcagtggcgagatcgctttcaagatggagcgtatcgggaaaaggcacatcggggagaaacgcggcgttacagcggtcgcgttcaagcgttgcgatatgttcagggtcatggccccagaggacaacctcgtggccatttcttgccagggtgatggcaagagcggtgccgtagctgccggcaccgatcacagtcatactagcattacgttggttcatcaggcatcctgatgttcttcagtaccttcgccagcctgctgctgcaaatagttcatgaacagcgcatcgaagttaaccggcgcaaggttcagttgcgggaatgtaccgcgggataccatgctggtgatgcactcacgagcatacgggaacagaatgttcgggcagtatgctcccaggcaatgcgccatctgggtgccttcgatacccgcgatggagaaaataccgccctgctgaacttcacacaggaacgcggtttcttcgcccaaagaggccgttacggtaacacgcagtaccacttcgtatacgtcatctgccagttgggaagatgccgtatccagatcaagtttaacttctggttgccaatctttctggaaaacgtgcggcgcgttcggcgcttcgaaagagatatccttggtataaatacgttggatctggaaagtcatttcagtgttgttttgttcactcatgtgtagaaaacccttaagtgttgtccttaaatactgcgcaatgtaatgccaacgttcacacgttatttcagcaggggatccagtccaccacgtgcatccaatgcatacaagtcatcacagccgccaatgtgctgtgcgtcaataaaaatctggggaaccgtggtgcgaccgctgcgtttgatcatctcttcacgcttggcggcgttgccatcgatcggcagctcctggaaactcacgcccttgctgctcagcagtgcttttgcacgatggcaatacgggcaggtttctttggtatagatttcaacattggccataaattagctcctgtttttttaccctgaaatttcatgttgcagggcggcagcaaaatggagtgtccccagaagcttataacaataagtcgctgggggcctaattgcagctaacggcctgcatcatgaaagacgacaggtaaattatttgccgcgcaccaaaggcaagttttcgccagcccagccagcgacgccttctttcagcacgaatacttgcgcaaaaccagctttcgtcagtgcgtttgcaggctcctggcactgcatgccagaaccgtctaccacgataaccggtttgtctttgtgcttctcaagctcaccaacattgttggctttgatttcgctcggcaacagattaatagaacctgcgatatggcctttacggaagtcatcacgctgacgtaaatccacaaccacagcgtcttctttgttgatcagacgcgtagcttcaccacgagtaatcaccttcactttgctggtcaggctcttaaacgtagtcacaagaaccgccaccagtaacgcgatccaggcgatactcagtatgggatgacggccaacaaattgcataatttcttgcatggggggtaacaactcccgacgtagtgattaaaaaaaccaggaaaggagtatacctgcgcggtgcggcaaatacagccagcgcgttaactggaatgcaattttgcggggcgcgacgaaaaaaaagcgtaaatctggcatcggcttgccgcgagcggtcgtatattttgatcttcagaggctattttatcgattcagctgtagtaaaattacgcaaattttgactcttgagtatgaggttgtcgcaatgttggtttctaaaaaacctatggtactggtgattctggatggctatggctatcgcgaagaacagcaggataacgccatttttagtgctaaaaccccggtaatggatgcactgtgggccaatcgtccgcataccctaatcgacgcttccggtctggaagtcggtctgcctgaccgtcagatgggtaactccgaagtaggccacgttaacctgggtgccggccgcatcgtgtatcaggacctgactcgtctggacgttgaaatcaaagatcgcgctttctttgctaatccggtgctgactggcgcggtagataaagcgaaaaacgcaggcaaagcggtacacattatgggtctgctctccgcaggcggcgtacacagccacgaagatcacatcatggcgatggtagaactggcagctgaacgcggcgcagaaaaaatctacctgcacgcattccttgacggtcgcgacactccgccgcgcagtgctgaatccagcctgaaaaaattcgaagaaaaatttgccgcgctgggcaaaggccgcgtagcgtccatcattggtcgttactacgcgatggaccgcgataaccgttgggatcgcgtagaaaaagcttatgacctgctgactctggcgcagggcgagttccaggccgataccgccgttgctggtttgcaggctgcttatgctcgcgacgaaaatgatgaattcgtgaaagcgaccgttatccgtgctgaaggtcagccagacgcggcaatggaagacggcgatgcactgattttcatgaacttccgtgctgaccgcgcgcgtgaaatcactcgtgctttcgtgaacgctgatttcgatggcttcgcgcgtaagaaagtggttaacgtcgatttcgtgatgctgaccgaatacgccgctgacatcaaaactgcggttgcttacccacccgcttccctggttaacaccttcggcgagtggatggcgaaaaacgacaaaactcagttgcgtatttccgaaaccgaaaaatatgcccacgttactttcttcttcaacggtggcgtagaagagagcttcaaaggcgaagatcgcattctgatcaacagtccgaaagtggctacctacgatctgcaaccggaaatgagctccgcagagctgaccgaaaaactggttgcggccatcaagagcggcaaatacgacaccatcatctgtaactatccgaacggcgacatggtaggtcacaccggggtgatggaagcggcggttaaagcggttgaagcgctggatcactgcgtggaagaagtcgcgaaagcggttgagtccgtgggtggacaactgctgatcaccgctgaccacggtaacgctgagcagatgcgcgatccggcaacgggtcaggcacacacggcacacaccaacctgccagttccgctgatttacgttggtgataagaacgtgaaagcggttgaaggcggcaaactttctgacatcgcgccgaccatgttgagcctgatgggtatggaaatcccgcaagagatgactggtaagccgctgttcatcgtggaataatccctccccatgaggggaaaggcgattaataccatgacacgggccgtgaaaccgcgcaggtttgcaatcaggcccatcatctacgccagcgttcttagcgctggcgtattgttgtgcgccttttccgcccacgcggatgagcgtgaccaactcaaatctattcaggctgacatcgccgcaaaagagcgcgcggtacgccaaaagcaacaacaacgcgcaagcctgctcgcacaattgaaaaagcaggaagaagcgatctctgaagccacccgtaagctgcgcgaaacgcaaaacacgctcaatcaactcaataaacagattgatgagatgaacgcgagcattgccaaactggagcagcaaaaagccgcccaggagcgcagcctcgccgcacaactggatgccgcattccgtcagggcgagcataccggtattcagctgattctcagcggtgaagaaagccagcgtggacagcgtttacaggcttatttcggctatctcaaccaggcgcgacaagaaaccattgcccagttgaagcaaacgcgtgaagaagtcgccatgcagcgtgctgaactggaagagaaacagagcgagcaacaaacgctgttatatgagcagcgcgcccaacaggcgaaactgactcaggcgctgaacgagcgtaaaaagacgctggcagggctggagtcttccatccagcaaggtcagcaacagttgagcgagctgcgcgccaacgaatcccgtctgcgtaacagcattgcccgtgcggaagccgcggcgaaagcgcgtgcagaacgagaagcacgtgaggcccaggcggttcgcgaccgccagaaagaagcgacgcgcaaaggcaccacctacaaaccgaccgaaagcgaaaaaagcctgatgtcccgtaccggtggtctgggcgcgccgcgtggtcaggcattctggccggttcgcgggccgacgctgcatcgctatggcgaacagctacagggtgaattacgctggaaaggtatggttatcggtgcttctgaaggtactgaagttaaagcgattgccgacggtcgggtgattctggctgactggctgcaaggctacggtctggtggtggtggttgagcatggtaaaggcgacatgagtctttacggctataatcagagcgcactggtgagcgttggtagccaggttcgcgcgggccagccgattgcactggtgggcagcagtggcggtcagggtcggcctagtctctatttcgaaattcgccgccagggtcaggcggtcaatccacagccgtggttgggaagataagttttgtttccatttcgtcgtaacgttcttgcatttgccgctctgttggcgctctcctcccccgtacttgctggcaaacttgccatcgtcattgatgattttgggtatcgcccgcacaacgaaaaccaggtgctggcgatgccttccgctatctccgtcgctgtattacccgatagtccgcacgccagagagatggcgaccaaagcgcataacagcgggcacgaagtgttgattcatctcccgatggcaccgttgagtaaacagccgctggagaaaaatacgctacgcccggagatgagcagcgacgaaattgagcgcattattcgtagtgcggtcaataacgtgccctatgccgtggggatcaacaaccacatgggcagcaagatgacctctaacctgtttggtatgcagaaagtgatgcaggcgctggagcgttacaatctttacttcctcgacagcgtaaccatcggtaatacccaggcgatgcgcgccgcgcaaggcactggcgtgaaggtgatcaaacggaaggtattcctcgacgatagccaaaatgaagcggacatccgtgtgcaatttaatcgcgcaattgacctggcgcgtcgcaacggtagcaccattgccattgggcatcctcaccctgcaacggtacgcgtgttgcaacagatggtttataacctgccgccagacattacgctggtgaaagccagcagcttgctgaatgaaccgcaggttgatacttctacaccgccgaaaaacgctgtgcctgatgcaccgcgtaatccgttccgtggcgtgaagctgtgcaaaccgaagaaaccgatagaacctgtttatgctaatcgcttctttgaagtattaagcgaaagcatcagccagagcacgctgatcgtttacttccagcatcagtggcaaggctggggcaaacagcccgaagcggcgaagtttaacgctagcgcaaattaattagcgcaaattaaaggcgctacgcgtaatgcgatggtggctccgcgttttgtcgcgccattgccataagcggaaagaccacagtaacgcctggtaaccgaccttcacgctgcgcacattggtaatcaggcgcttatacataccggaagtaaatatctcggcaatcatccgttggcgggtaagaatatccggctctttgcgcaccgcatggcaaacacgcaatgcctcgtaagttatttgctgatgaaattccggataaatcataattttgtcggcataatttcgatttaatttctccagcaggcgggtaatcttaatatagtgacgttgataattaaggtttttattcccttgtctatgcaaccgactcacactcgtattatgcagataatatttatataaactttgctcggtatatcgcgcacgcagcgcgttaaacatgaattctgttgtccagacaatatcctgatgatgtaatccggcaataaatttaatgttatttttaacaataacatcacggcgataaacccccatccagacaacgtgagtccaacggcggctagaaagccccatccgcagccagtccgggccggttaatacgccggtactgcgaaggcgatcggtggggatggattgccaggtttctcccgtttcacgaaaacaccagtcagcgttgcactgcgccacgtcgaggtcgtcctctaacgccatggtcatcagcgtttcgtacatggtgggatagacttcatcgtcagcatcgacaaaagcgacatatttgcccgttgccacttcaatcccacgattacgcgccacgcttgcgccagcattcgcctgatgcaacaaacgaacgtgcggatagttttctgcgtaatactttgctatttcaacagaattatccgtactaccatcgttaataataatgatttccagagcagtccaggtttgcgtaattaaagattccatacaagtgcggaaatcatcgcccgcattatataacggaataataacactaagtttattggtgctgttcatcataaattaccgacgacctctgaagttatcctgacgttttacaggctttgtattaagaaactattaagcctgtgagatattatttttacaggtgagagagtcacttcagggtagagagataatgagagcagctatataagagatcagcacaattacgaactctttattacactgacaggattttacatatttaacagattatcctcagataaaagggctggaataccagcccttgttcgtgttaatcccagctcagaataactttcccggactggccgctacgcatagcgtcaaagcccttctggaaatcatcgatagagaaacgatgggtaatgatcgggctaagatcgaggccagactgaatcagcgccgccatcttgtaccaggtttcaaacatctcacgaccgtaaatacctttaatgaacaagcctttaaagatcactttggtccagtcgatagacatatcagacggcggaatacccagcatcgcaatacggccgccgtgattcatggtgtcaagcatggtacgaaacgctggcggcgcaccggacatttccagaccgacatcaaaaccttcggtcatgcctaactccgccatcacgtcattgagattttctttggcgacgttaaccgcacgggtgatacccattttacgcgccagctcaaggcggtattcgttaacatcagtgatcaccacattgcgtgcaccaacgtgtttcgccaccgccgctgccataataccaatcgggcctgcaccagaaaccagcacatcttcgcccaccagatcaaagctcagcgcggtatgcacggcgttaccgaagggatcaaaaattgcggctaagtcatcggaaatattgtcggggattttgaaggcgttgaatgccgggatcaccagatattcggcaaagcagcccgggcgattaacaccaacgcctatcgtgttgcggcacaaatgggtacgaccaccacgacagttgcggcaatgaccacaggtgatatggccttcgccagaaacgcgatcgccgatcttgaagcctttcacttcctgaccaatacctaccacttcaccgacatattcatggcccacgaccatcggcaccgggatggttttttggctccactcatcccagttatagatgtgaacgtcagtcccgcagatggctgttttacggattttaatcagcagatcgttatgcccgagttccggtacaggaacgtcggtcatccagatgccctcttccgctttcagtttggataacgctttcatctcacatcctcaggcgataacgcccagttgtttaccaatacgcgtaaatgcttctactgcacgcgtaatttgctcaggggtatgcgccgcagacatctgggtacgaatacgcgcctgacctttcggaacgaccggatagaagaaaccggtaacgtaaatgccctctttttgcagctcacgggcaaatttctgcgccactaccgcatcaccaagcatgaccggaataatggcgtgatcggctcccgccagggtaaagcccgccgcgctcatttgctcacggaactgacgcgcgttcgcccacagacggtcacgcagttcgctgcccgcttcgaccatctccagtactttgatggacgcggcaacaatggccggtgccaggctgttggagaacaggtacggacgagaacgctggcgcagccactcaaccacttctttgcgcgccgcggtataaccaccagaagccccgcccagcgctttaccaagcgtaccggtgataatatcgacccggcccatcacatcgcagtattcatgggaaccacgaccattttcaccgacaaaaccgaccgcgtgggagtcgtctaccatcaccagggcatcatatttatctgccagatcgcaaacgcccttcaggttggcaatcacgccgtccatactgaacacaccatcggtggcgatcagcacatgacgcgcaccggcttcacgcgcttctttcagacgtgcttccagctcctgcatatcgttgttggcatagcgatagcgtttagctttgcacagacgcacaccatcaataatagacgcgtggttcagtgcgtcggagataatggcgtcttccgcacccagaagcgtttcaaacaggccaccgttagcatcaaagcaggaagagtagagaatcgcatcttccatccccaggaaggccgccagtttttgttcaagctctttatggctgtcctgagtgccgcaaataaaacgcacgctagccatgccgaaaccgtgagaatccattcccgcctttgccgccgcaatcagatcaggatgattcgccagcccgagatagttgttggcacaaaagttaatgacgtggcttccatcagccacagtgatatctgcttgctgcgcagacgtaataatgcgctcttctttaaacaacccttccgcccgtgcggtttccagatcgttggttaactgctgataaaattctccacgcattgcgattctccagacagggcaaattccagcacatattacccaaacttataggtcgcgacgagataacgcgttaacacttctgcaaaattcaggataaataacgtgtaacttgatgtctctcaacacctacagatagtagaaaaactgtacagttttggctgggcataatgatgattgattttactgcattgatataaaaagaaaaaatgatgccaaagcatcatttttcctatctcagttggtatcaaaacgctacccactaatggagggaaacttattttctactaaggaaaattctcagcgcctgcatttttgcccctaaagtgttactcctgaagcagcgaaacaaatcgaaccattttcctctccccagatagtttaggttgaagagatcggggcgtttgtaatagcacatgacaaaaatgccctggtcatcgtccacaatgttattatttagtgttattttttgactttccagaactaatttatagaattctttccatttatgctgactaccaacaattgcgcccccaataatatatacatgattgccaatcatgaaatcaaaaacctgttgttgagatgtgacagtaagccctttttttatagtgaaaagatgcatcttactttcatcaaatgggaaatcccaaattttcaatcctcgagttacatttggcttatggcaatagccaaaatctatccacgcaacaagaggcgttttcactaagcccatgttgatagctttatttacaaaataggccttaaggttacataccaaaacatactctggactccagtactctgggttttttaattgtcgaggctcaagtctatttgtaaagctctcatctttttgaattttttcgatacgacttctgatatatctaaatttcttttttatatcgataacgataaccgttgttggttttccgttgcgaatcgcttcaacccttggtttcaaatcgggagaagtgaaaataatcatctcattttcaagtgcggccagacgctcaaagtaactaaaataaacatcaacactacgagctagtttttcacggaaccctttattagcagtccaatcccctctaccaatgtcaaaatatgcagtgataattgtggtggaacttttcattactaataagaccattaatataaaaaaagaattatatcataaatattaatagaatgtatactgtatattatccattcaaatgcttccgttatttatcatacatcggaatattgatactaaagcactattcacatgcaaaaccaacatccgccatgaaggactagctaaaacccaaactagtttgttgcaattagcatccttgcacctctatgtaaagggctgaagggattcggatgtgatggtatgattacagacattcgtgtctgagattgtctctgactccataattcgaaggttacagttatgatcatcgttaccggcggcgcgggctttatcggcagcaacatcgttaaagccctgaatgataaaggcatcaccgatattctggtggtggacaacctgaaagacggcaccaagtttgtgaacctggtggatctgaatatcgcagactatatggataaggaagacttcctgatccagattatggctggcgaagagttcggcgatgtcgaagcgattttccacgaaggcgcgtgctcttccaccaccgagtgggacggcaagtatatgatggataacaactatcaatactccaaggagctgctgcactactgcctggagcgtgaaatcccgttcctgtacgcttcttccgcagccacctacggcggacgcacctccgactttattgaatcccgcgagtacgaaaaaccgttgaacgtctacggttacagtaaattcctgtttgatgaatatgttcgtcaaatcctgcctgaagcgaacagccagattgttggcttccgttatttcaacgtttatggaccgcgtgaaggccataaaggcagcatggcgagcgtcgctttccatctcaacacccagcttaacaacggtgaaagtccgaagctgtttgaaggtagcgagaacttcaaacgcgacttcgtctatgtgggcgacgtggctgatgtgaatctgtggttcctggaaaatggcgtttccggcatcttcaatctcggtactggtcgtgcggaatccttccaggcggtagctgatgctacgctggcttatcacaagaaaggccagatcgaatacattccgttcccggataaactgaaaggccgctatcaggcgttcactcaggcagatctgacaaatctgcgcgcggcgggttacgacaaaccgttcaaaaccgttgctgaaggtgtaacggaatacatggcctggctgaatcgcgacgcataagagctctgcatgaaaatactggtgatcggcccgtcttgggttggcgacatgatgatgagccaaagtctctatcgcacgctccaggcgcgctatccccaggcgataatcgatgtgatggcaccggcatggtgccgtccattattaagccggatgccggaagttaacgaagctattcctatgcctctcggtcacggagcgctggaaatcggcgaacgccgcaaactgggtcatagcctgcgtgaaaagcgctacgaccgcgcctacgtcttacccaactccttcaaatctgcattagtgcctttcttcgcgggtattcctcatcgcaccggctggcgcggcgagatgcgctacggtttactcaacgatgtacgcgtgctcgataaagaagcctggccgctaatggtggaacgctatatagcgctggcctatgacaaaggcattatgcgcacagcacaagatctgccgcagccattgttatggccgcagttgcaggtgagcgaaggtgaaaaaagttatacctgtaatcaatttagccttagtagtgaacgtccgatgattggtttttgcccgggtgcggagtttggtccggcaaaacgctggccacactaccactatgcggagctggcaaagcagctgattgatgaaggttatcaggtggttctgtttggcagcgcgaaagatcatgaagcgggcaatgagattcttgccgctttgaataccgagcagcaggcatggtgtcggaacctggcgggggaaacacagcttgatcaagcggttatcctgattgcagcctgtaaagccattgtcactaacgattctggcctgatgcatgttgcggcggcgctcaatcgtccgctggttgccctgtatggtccgagtagcccggacttcacaccgccgctatcccataaagcgcgcgtgatccgtttgattaccggctatcacaaagtgcgtaaaggtgacgctgcggagggttatcaccagagcttaatcgacattactccccagcgcgtactggaagaactcaacgcgctattgttacaagaggaagcctgacggatgcgggttttgatcgttaaaacaagcagcatgggcgatgttctccatacgttgcccgcactcactgatgcccagcaggcaatcccagggattaagtttgactgggtggtggaagaagggttcgcacagattccttcctggcacgctgccgttgagcgagttattcctgtggcaatacgtcgctggcgtaaagcctggttcagcgcccccataaaagcggaacgcaaagcgtttcgtgaagcgctacaagcagagaactatgacgcagttatcgacgctcaggggctggtaaaaagcgcggcgctggtgacgcgtctggcgcatggcgtaaagcatggcatggactggcaaaccgctcgcgaacctttagccagcctgttttacaatcgtaagcatcatattgcaaaacagcagcacgccgtagaacgcacccgcgaactgtttgccaaaagtttgggctatagcaaaccgcaaacccagggcgattatgctatcgcacagcattttctgacgaacctgcctacagatgctggcgaatatgccgtatttcttcatgcgacgacccgtgatgataaacactggccggaagaacactggcgagaattgattggtttactggctgatagtggaatacggattaaacttccgtggggcgcgccgcatgaggaagaacgggcgaaacgactggcggaaggatttgcttatgttgaagtattgccgaagatgagtctggaaggcgttgcccgcgtgctggccggggctaaatttgtagtgagcgtggatacggggttaagccatttaacggcggcactggatagacccaatatcacggtttatggaccaaccgatccgggattaattggtgggtatgggaagaatcagatggtatgtagggctccaagagaaaatttaattaacctcaacagtcaagcagttttggaaaagttaagtagtttataaaggtaaaacatgctaacatcctttaaacttcatagtttgaaaccttacactctgaaaagtagtatgattttagagataataacttatatattatgtttttttagtatgataattgcattcgtcgataatactttcagcataaaaatatataatatcactgctatagtttgcttattgagtctaattttacgtggcagacaagaaaattataatataaaaaaccttattcttcccctttctatatttttaataggcttgcttgatttaatttggtattctgcgtttaaagtagataatagcccatttcgtgctacttaccatagttatttaaatactgccaaaatatttatatttggttcttttattgttttcttgacactaactagccagctaaaaagtaaaaaagagagtgtattatacactttgtattctctgagttttctaattgctggatatgcaatgtatattaatagcattcatgaaaatgaccgcatttcttttggtgtaggaacggcaacaggagcagcatatagtacaatgctaatagggatagttagtggcgttgcgattctttatactaagaaaaatcatccttttttatttttattaaatagttgcgcggtactttatgttctggcgctaacacaaaccagagcaaccctactcctgttccctataatttgtgttgctgcattaatagcttattataataaaagtcccaagaaattcacttcctctattgttctactaattgctatattagctagcattgttattatatttaataaaccaatacagaatcgctataatgaagcattaaatgacttaaacagttataccaatgctaatagtgttacttccctaggtgcaagactggcaatgtacgaaattggtttaaatatattcataaagagtccttttagttttagaagtgcagagagtcgcgctgaaagtatgaatttgttagttgcagaacacaataggctaagaggggcattggagttttctaacgtacatctacataatgagataattgaagcagggagtctgaaaggtctgatgggaattttttccacacttttcctctattttagtctattttatatagcatataaaaaacgagctttgggtttgttgatattaacgcttggcattgtggggattggactcagtgatgtgatcatatgggcacgcagcattccaattatcattatatccgctatagtcctcttactcgtcattaataatcgtaacaatacaattaattaagaataaacaagtttaagaagtgagttaaaactcacttcttatctatacaacttaatctctttacactattagttaaagtttcagtatcgatatcttttaccgtatatgttggggatactatttgtatagatttatgatgattcggggaccaaattaaatggctgggatattccggagtacgactattagggtaaaatgcaagcgttggtttatgataagccgcagcgatatgaacaagagctgtatcaacagaaatgacaaaatcactatacttggtcaacgcaacggtataaataaactcatcaaatggtagtgtttcgatttcaagtattggtattgtcaataaatcttgcggtaacccggtaaatataatccgataattttcaaagtgtgttttcacttcttgatatataacttttatttgctcaaacgtaagacggcatattttttttgcacctaatggattaataatgactattcttgtatctccaataaattcttttattttatcttcaacatctactggtaaatgcaagtcgtagttggtggaaaatttaccctcaccataaatatgcttcagtatttctattgctcgtgtactcatatgttcttttaaacattcatcgtggggatggtaaaaactatagtaacgcttataccaatgatcaaaacccagaatgtaagaatcttttaaactacttaatattaagctatgcttaaaactgggcatagtttcaaaggggtctaatacaatatcgaactgtaaatcccgcagatgcttacatagagtaagcatttcaagaaaaccggtactttctttaatacagaactcaaatatatttttattattagagagaaattccccaccctttctatttgtgagaagagttattttaacccctttactataaagttcacgataaatgctacttaatacaattagatcaccaagtttattattatcatgaataataaggcaacttttaacttgtgctggatctgtaatttgattatttattttattacgaaataaaaaagaaaggaaattaatcttgattttgtttatataaaatcttttctttttgtgaaaagttcctaagcgcatttttataccatattattttagtttcaggatgattaattagcataagaatcggtactagttctatattgcattttttttcttgtcatatctttactttcttctgcactgatgtcttgaagtttaataaatggaattacatcgtaagaaatagctgtatcatcacttaaattataaatattaatatcttttacattatcatgcataaaacgaaaaaatggcaatattttgaataaatccctacttaattcgctgggcatgggatttttattctcatcatagaaacgagaacagctacccgttaaatcaagaccagaacaaataatccgcgcatacttaagactatatgcgatttgaattgcagcaaaggcaatagtatggcaactgcaataaccaagactaatgtccttgcaaaatccaaccagacgaccttttttagacaacggtacagagatcagcagttctttgtgaatctgtctcaaaatattaaatttaatcttctttataaaaccacctttttcccgacggtaaaaggaccgtaatacgaggcagttctggaggatataaagtttatcttctttggaagcgtgttcataaacgtcaacgtttactatggtataacgacttctctggctaaatttataaaaatcatcacgacgctgatgtaaaaatcggacatctgtaagtacatatataaaaggaacgatattattacttaacagatattgcgcagaaccattgacagcaataatatcctttgttcgtaatacactcaaaggtgttttttggcttgtagggccgctaagaaaaataataacatcatcagatattttattttcaatcaggttttcaacatcttttttgtcaatgtatctaatattcttcatgataaacctgtgaaataaataactccgcttaaaactgtcctggtgaagacatgtaattgtgggattttttttagcgcgctggtttccctttcaaacgccgcataaaattgcgcatttttttacgatatactaaaagataatagcctagatctctaatctcatttttaataccgtaatgacgctctaagtcaatacgatctttcgctttacgctgcgcactagcacgctttccggagagatcgataattcgaacctcaccattttttataatgaagttaccacgatgggggtcgccagaaaccatgccatgttgatgtaaggcattaatactttgctgaattttattttttagcgcatcatcaatatcgggcatatcacacaactctatgccatcaatatactcgatgatcatgatataagtatggacaaaacgtaaggttttccgttcagccaataaataaaagtcattgagtgtatttaacccttcatttcgtactttttgggtttgctcaaaaaggcgttcgtaataatcaccttttaacagagacttaaagaaacgttcgttacgcttaactttcggagaaaaaaccttaagaatcaatttaccgtaatcggtatcaataagcataacttttgtatcatcaatagaacgaaaaaccttgatgatatttatattataagacaagaagtcatttaatacattgaggtacttactattgttttcatcggtaaaaacaaccaagtctttgatcttgctcttctgaatcataataaaccagttaaatgttatttacggtaatattttcggcaaagataacagactcctgctataattcctgagatataatgatgttgcactaaaagatgtttatatcttttttaaattcaataattgatttcgcatctcgtggagagtcatctttccagggggaattttctaaagctattttatagtattttaccgatggataaattgcccatttgtgccacggtttagttgcacctgtataatgaataagaagagtactttctgtaatcagctttttatagttttgatgtgttttgtcttttaattcacttttaattgtataaattgtattgtactcacgaggcaaaaataatgtcatccctttcagtaagacattcataacatcctgatcagggtatttataaacattatctttactcataagaatagacaacgctttttctgttagttttgcgtcagcccattttcttaagtctaaataaacgacaccggaattaaagtactgcccaagtaattcaggatcagacaacctggataccgccttttcttgcattggctcaacatctttaacaacagcagcaaccgctccatttaaacccagatgtaatagttggctaatatcgcctttacaaacaacatctgcatcaagataaagcaaacgatcaagcgttaaacccaataattgaaatgcaaataaacggaagtacattgctcttgaccagacctgtgtacaaggcaagcactggagcttatcagtgttaattctatataacgtgattcttaattggttttgctctgcaagctttgcaattttttgaaaaaaaccatcattataaacatcagcaataatataaaaatcaagattaatatgtcgattatttaggacaattgatgtgatggaaacacctacaccatcaagataattagcatcgacaccataggcaacatttaaacattcagaagtatttatattagctagccgaaaatcccaggctttaactttatctatctctatggcaggaaatgagtccacaatgctacccttatatcattactttatagtttcccagttttaatgctttatcttttcaataaaataaaaaagatagttgctaaatccttttagatatctatgctttttaagcatatgttttgcgctatatcttaattgattgctattgttcggtttcagcaacgccgtattcttccatgggctagcattttttgcctccataaaggcttgacttacaggataatcccaggcccaatcatgccagggcttggttggcccgatataatggataaaaatagtatcgttggttactgggtttataaagctttctttgagttgataatttaagctgaactgggtgttatatttaatatcagcgaaaataagtttatccgccagcaacatatttaacacatcctgatcaggatgtgttatttttttgattatttctggctcatttagcattgcaatagctcgtgcagaaacctgctgagccgcccattgggcagtattaatcaataaaaaaccggagttaaagtaacctttagcaattcccgcaacacctaagctatgggcgcgtttttcccaccagtcagcttgcccttctgtaacaaccattgcgactttatcgtcaggaaaactgaaattaattagtggctcaatagtcccctgacaaatgatatctgcatccagataaaggactttaggcgccttattaataaagtaatctgcaataacaaaacgaaaatatattgcatgagtccaattcttagtgctaggcaaactgcgcagtcgatcaccattaatcagatatattttaattctggttttatactgcaacgccagggcatcaaaatacttacgatcatcatcaccaaaataatcagtaaaaatatggaaacacaatcgacttccttcattatattttaatatactagcaatgctaattccgcaaccaaatagaaagtttttgtcagttccataagcgatgtccagacaaagattttctgtttctactttatgatcataatcaataacactattaagaaactcagtttcctggaaaaacacctgctgcattatttcctccgggaaatagcagaaataattaccttatgtaatctatcgtaatacttgctttggtaaaattcatcgatgctcgcaggaattttttcatgttcgatatgaatttcacctgctatatatttatttagaagagttacaaaaccagcaatatctcccggttgatacagatggccattgacatcaggttgaataatgtcagcaggcccggagacacaatcggcactgatacaaggaatcccccagctcaaggcttcaagtagggtcattgggaaaccttcaaaagaactcgtgagcaataacgcactcactttttcaatatcttgctggaccaattcccagggatattgttgccaaccataccagacaattcgatcatcaatatttaattctctaccataagcctggcatttttcgaaatcggagccatcacccaatacatggagtttccagttacctttcgcttgacttaagccatcaagcaggtctttaactcttttctggccttcaaatttcatacgcccaacataaataaacgttgccgtttcaccttcctcgggcgcgggaatgacactgtctttagtttcgacgggattaaaaataacatttatcgtgctttctgctacacctcgattaatcatttgctgtttaatgccagagctgattgctaaatgatagtcggcacaggtgatatattcagcatgttttttgtgatctaaagaaaaatgtggccaactaaatactggcatatcaattccactttttttacgtgcttttgcggcaaacaggcaggagatcacatcaatacaaataacgatatctggttggtactcctgaagccatttacttagagcatgaatatgtttcgcccgacgcaaaaaacctaaacgaatattggaaaaactacaactgtatttaataccttccagccatcccttatccattttgtcattacgacaaaagaaaaacatttcactttggatatgttgttgcctgaaggtagtaataacatcacggatgacagtttccatgccgccaaatccagaaacagcttcgccgataaacgctattttcatagaaactctcattaattgagtaaaactcactgttttaacggttttatttgtctataaaatcagaaacaatcgtactcatcattttatctggactgaatttatataaactatcataatccattggtttaacagaactgttaataaaatactctaacttatcccaatcatcatgacctattataaaaaagcgagattcactatagatttcactaccaaatacatttatattattagtaattaattttttattgaaaaatagtgcctcaagtatacgaagagtccagccagattggttttctttggttatatcaacaattatattagcatttaatgttcttctaatattctcttcataagatatttgtttttcaatcaaatacttactagtcgtagaacttgtcttatctttgacaacattaaaatctagcttacatcctagtgttgttaatctctcggctaactcattaattatttgaagacgccctttatcacgaccaaggaaaaaacatattggctggctgttatttttgtcagataaactataatttctaatttcatccattcctataggaaaaaattgttctattgccttgatcttttcattccctataaatctatgctcaaaatcatatataatatcgaaataattcgcgttatcaagaataaaatcttcgccaacagtatttcttagaagcaaaactttatgacagttaatattttttaatatttgtttattgatacctttattaacaacactgtcattaatgataattatgtcatcttttttaatatcattgaggtaatgcttgatgaataatcgccccagccatgcattatccatccctattttacttatttttttattaatccagttatatttttttggtgttgttatattttttatcttgtacttttttttcaggtactgaatcatttttaattcataatctgcaacccaatttataaaataaatagtcataataaagttagttccagtacatactaataaatatttttataatcctttgcgttgtgttcgctctttaatacgctcggccttaacgcttgccatgttcaataaattctgttcaagagacaatattttgcgtaaaggcatcccaaaataaaccttcataaatcgccagatatctctttgcgtcaggccaatattcatactactgaaatataaaccaatcaggtctttatcgcgccagcggcgcggtacttttgcacgtatctgtgcccgatgcagatcgataacactaatttttaattcatcttcccggccagtaaatggcaaatgaagcaaaaagtggcaaatgtaacagtcgcggtgatttatccctgcagtatgcattttacgcaccatagttgctacacgtgcgatcagcatacgcttaacacgtatatcaggcgggttgactgcccaatcggcacaataatcttcaaggctaattgtgggagtgagatcttcggtaataataaaacttgcgcgagttaatggatttaaccctttttcgccaaacccaatgcccttcattgtatcaacgccaacatcactcaggcgatgaatagcgtgccactctctgtctgcgcccaaaacgggcatccgcaaactgagtagattttttataatctcttttaatgtcgtccccttgtgccatttaagaaaatagcttttcccggacagttcaaagcgtaatgtacgacgagtctccagttcacgaaagacctcgccgttcagttttttgacctctgcaaaagcatctttaccacgccaaagtgtggcaagcggctcttttaattcaaccatctaaaccacctgtaatgatatccgcggctttttctggcaagctatacaaatcctgagtatcggcataatggcgagcattctccgcccaggccattcgcaatgggctctgagttaacgctttacgtaaaacttcatttaattgttcctgagagaaaggttcagcgatgaccgttccacaattggcatccgcaatataatgcgcgtacccacataccgctgttgttaaaacaggtaacccagcagtgatcgcttctagaagaacgatacccgcggcttcctgataagcgggatgcagtaataaatcagcggctgccattaattcactcacatcattgcgaccgaagaagaaatgcacattgctccgcacgccgagtttttctgccagcgcttcaaattttcgcggcttatcctgaccaacaacaaataaaagcgtattgtgacgtaaactttccggtaagcttgccaaagcttcaatactgcgatctacacctttacggccaaaatcacttccaacctgcagtaataagttttgttgctcttttatgccatttttctggcgataaatttcacggctgtttgggatttgctcactgtattttctgtccggataaataccgggaggaagaatttgaaaacgttcaggttcagtttgataatgcttctggaaatcggcgatttgcttatcggtcagcatcataagtttcgtgcttttaccctgctcgaaagtcgctcgctcaaatgcggcataatggcgatatcgacttgttaaacgatataaaaaacctttttcttgcgcaactttctcggcgtaacaaacatcagcggcaaaataaacatccaggccaggcatcttattaaacccaacaacgcgatctgcgggatgctctttgagatgattttgtacccaggcataatattctgcattgcgtccatggttggtatgggacttaactggcacctgaataagctcaaatgctttcgggcaatcgccttcccagctctgtgtatatacccgaacatggtggccccgtgcggcaactgtacttgcaatgcgcataaagtcacgttgaagcccaccaaatggaaaatatttatataaacaaaacgccacgatcataattgtgcattcctgtcagcactaggggcatcttctggcaacagcttttccgtagcggcgatcacatcctccgctgggataacagaaagatattttttgttgcggtcaagttcatgccgggtcggcattttctgataattccccgcccagaattgaataatattctcggtccagggacgccagaatacgtgatccgttgcaccaaatagactaatgactggcgttttcactgccgctgcaatatgtcccggcgcagaatccacaccaataaaaagcactgcatgatcaattaatgcacccagttcaggaaaacgtgttttacctgcaaggccagtaatgggttttgtttcgcaacctcgtgcaatctcatctacacaagcgagatcatctgcgctgggcccacaggttagcacaacctgatagcctcgctgttgcagcgcatcgataaccttagaaaatttatcgttatcccaacacttaaatatctgacgcgctgtcggttggatgacaacataatgatcttttacgcccagggcatctaattcccggcgcatcttcttccagcaatcttcggcgtaactcattgttgtgtcggtgtagaaatcggtaatacctaatggctcaaggacgcttaaattacgctcaacaatatgtgtaccgtgtattggcgctaagtgtgtgaagctttttttccaaataccatgctgccgatgaccataaagttggcttattttcatccgtgcaggtaaacaacgtaccagcagcgccaccatccactgatccgtaagattaatgaccaggtcataattattcgcacgcagagtttttatcaagctaagcacatttttaattttatcgaaagttcccgcacctttattgcttatcccatagagcgcattaatttccgggttttcagacaaaatagggatggtgtcctgataaagcagcatatcgatttttgcatcaggataattctgcttgagcgtactgatgacaggagtagttaataacatatccccatgatatcgcatctttatgaccaggatttttcgaaatggcttttccactagcgactcttttgtgtgattgtctggttaagttaagcagaaaaaagcacgctaccgccccaggctcaacagctacctgaatactgataacgcacttactttgacgtgctagtgtatcatttctttcgcagcaatccgacccgaatgatttttatacacaaaatatactttaatcataaaaatcaaatagataaaaaatagcatttcgataatgtcagtacggcctatgtagatttgaaaatggggccgagtttcaatgaatcgcataaaaatacaaaaaaaatgaagatgtagcggcagatcagaccaaactgaagctatttaagtcaaaaacgggaaaagtaatggtaaagccacagctaaatacatagaatccccagcacatccataagtcagctatttactatgctcgaattgctttacaccgcccttctctaccttattcagccgctgatctggatacggctctgggtgcgcggacgtaaggctccggcctatcgaaaacgctggggtgaacgttacggtttttaccgccatccgctaaaaccaggcggcattatgctgcactccgtctccgtcggtgaaactctggcggcaatcccgttggtgcgcgcgctgcgtcatcgttatcctgatttaccgattaccgtaacaaccatgacgccaaccggtagcgagcgcgtacaaagcgctttcgggaaggatgttcagcacgtttatctgccgtatgatctgcccgatgcactcaaccgtttcctgaataaagtcgaccctaaactggtgttgattatggaaaccgaactatggcctaacctgattgcggcgctacataaacgtaaaattccgctggtgatcgctaacgcgcgactctctgcccgcagcgccgcaggttatgccaaactgggtaaattcgtccgtcgcttgctgcgtcgtattacgctgattgctgcgcaaaatgaagaagatggtgcacgttttgtggcgctgggcgcaaaaaataatcaggtgaccgttaccggtagcctgaaattcgatatttctgtaacgccgcagttggctgctaaagccgtgacgctgcgccgccagtgggcaccacaccgcccggtatggattgccaccagcactcacgaaggcgaagagagtgtggtgatcgccgcacatcaggcattgttacagcaattcccgaatttattgctcatcctggtaccccgtcatccggaacgcttcccggatgcgattaaccttgtccgccaggctggactaagctatatcacacgctctagtggggaagtcccctccaccagcacgcaggttgtggttggcgatacgatgggcgagttgatgttactgtatggcattgccgatctcgcctttgttggcggtagtctggttgaacgtggtgggcataatccgctggaagctgccgcacacgctattccggtattgatggggccgcatacttttaactttaaagacatttgcgcgcggctggagcaggcaagcgggctgattaccgttaccgatgccactacgcttgcaaaagaggtttcctctttactcaccgacgccgattaccgtagtttctatggccgtcatgccgttgaagtactgtatcaaaaccagggcgcgctacagcgtctgcttcaactgctggaaccttacctgccaccgaaaacgcattgaggttgttatgcaaaaacgggcgatttatccgggtactttcgatcccattaccaatggtcatatcgatatcgtgacgcgcgccacgcagatgttcgatcacgttattctggcgattgccgccagccccagtaaaaaaccgatgtttaccctggaagagcgtgtggcactggcacagcaggcaaccgcgcatctggggaacgtggaagtggtcgggtttagtgatttaatggcgaacttcgcccgtaatcaacacgctacggtgctgattcgtggcctgcgtgcggtggcagattttgaatatgaaatgcagctggcgcatatgaatcgccacttaatgccggaactggaaagtgtgtttctgatgccgagcaaagagtggagctttatctctagtagcttggtgaaagaggtggcgcgccatcagggcgatgtcacccatttcctgccggagaatgtccatcaggcgctgatggcgaagttagcgtaacgtttatgccggatggtatgccatccggcgcgcatgaattacttctggcactgccgacaataaaacgttgcccgctgcgcatgtttagtcgccacaatcggcgtaccgcacacccgacacggctcaccttttcgcccgtaaacctgcaattcctgagcgaaatagcccggtttaccatcactttgcagaaaatctttcagcgttgtaccaccctgctcaatgctacgcagcaacaccgctttaatcacccgagctaacaattcacactctgccaggctcagactactcgccagccgatccggatggatccccgccgcaaacagactttcgctggcatagatattccctacccctaccaccagcttgttatccatcagccacggtttaatcgccgtttttttcttcgcgcacttctgatgcagatactcaccattgaaatcgtcgctaagcggctccggtccaagatgggtcagcacattatgcccttccagctctttggtccacagccaggcaccaaagcggcgcggatcggtgtagcgcagcactttgccgttgctcatcaccaaatccacatggtcatgcttttcagggggaagttcttctggaaggatgcgcaggctgccagacatccctaaatgaatgataatccagccctcaggcagctccagcagcagatatttagcccgccgctgcacgctaagcactggttggtcgcttaaacggtagatctcttcactaaccggccagcgcaagcgtccgttgcgcaccactgcatgaagaatggttgcaccaacgagatgcggttctatgccgcggcggctggtttcaacttcgggtaattcaggcatagcatctccaggaatgaacagatgcagtcaatatgggggcaagcagataacaaaaaaccccgccggagcgaggttttttgttacatcaaagcgagaattatttgattttcgcttctttgtagatcacgtgctggcgaacaactggatcgaattttttcagttccagtttttccggcttagtacgtttgttcttcgtagtggtatagaagtgaccagtaccagcagaagaaaccagcttgattttctcacgaatacctttagccatgatttatttcctctaagtacttagtacttttcgccacgggcacgcagttcagccagaactgtatcgatgccttttttatcgattacacgcatacctttagcagatacgcgcagggtgacaaaacgcttctcgctctcaacccagaaacggtgagagtgcaggttcggcaggaaacggcgtttagtcgcgttcagtgcgtgggaacggttgttaccggtcaccggacgcttgccagtaacttggcagactcgggacatgtctattctccaaaaatcaaattagctcgagcttcgtatggggtattggcgcctcgtcaggctttacagcccggtcatcgcagttctatgtgaactctcgattgccaggcccaaatgccaaacccgagattctcaaaggtggcgtagtatacgctgactcagcgatgtgctcaagtcccgaacagacaaagatcccgaaggatcgcgcatagcgggttaaatccagccgcgttcggcaaaagaaacatactctccacgcccaatcacgatatggtcgagcacgcgtaaatccatgaactgacaactctttattatccgttcagtaatgagtttatccgctttactgggttcagcacaaccgctagggtgattatgtgcaaggatcagcgcgctggcgtttatttttatcgcttcgcggataatttcccgaggatggacttcaacatggtttagcgtgccggaaaaaagacgcctatgcgttataacccggtgttgggagtcgagaaagatcaccataaagatctcccgctcctcacccgtgagctggctttgtaaaaattccctcgtcatctccgggctgagtaaagggctttcttcacgcatccgcacgttgtagtaacgccgcgccagttcagcaatcccctttaactgggcaaatttcgccacgccaattccatgaacgccactaaattgttcatattcagaggttaacaagccataaagagagccgaaattctccagcatctcttttgccagggttaatacatctttaccgcgcgttccggtacgcagaaatagcgccagcagctcgacatccgttaaggcgctaataccaaacttcagcattttttcgcgcggcatcaacagctgactattgtttttcaccttcacctcctttgtggtgctcgcatcctgtcatagccgtttcgttaaatcgacggccagttttcaatcctggaaagcgcctcgcaaagtgaatctcaggtgaaggcacgacaacaaaagtattgtgataaaatcgccaacttctggtgtcaccctacaggaaaaatcatcatgagcctggccggtaaaaaaatcgttctcggcgttagcggcggtattgctgcctataaaacccctgaactggtgcgtcgtttgcgcgatcgcggggccgacgtccgcgtagccatgaccgaagcggcaaaagcctttatcaccccacttagcttgcaggcggtttctggttatcccgtttccgacagtctgctggacccggcagccgaagccgctatgggccatattgagctgggtaaatgggctgatttagtgattctcgcccctgccacggcagatttgattgcccgtgttgctgccggaatggcgaatgacctggtaagcacgatttgtctggctacacctgcgcctgtagccgtgctccccgccatgaaccagcagatgtaccgtgccgctgccacgcagcataatttagaggtgcttgcttcccgtggtttgctcatctgggggccagacagtggcagtcaggcttgtggtgatatcggtcctgggcgaatgctcgatccgttaaccattgtggatatggcggtagcgcattttagccccgtcaacgacctgaaacatctgaacattatgattaccgccggcccgacgcgtgaaccgctcgatccggtgcgttatatctctaatcacagctccggcaagatgggttttgctatcgccgccgccgctgcccgtcgtggcgcgaacgtcacgctggtaagtggtccggttagtctaccgacgccaccgtttgttaaacgtgttgatgtgatgaccgcgctggaaatggaagccgccgtgaatgcttctgtacagcagcaaaatatttttatcggctgcgccgccgtggcggattatcgcgcagctaccgtggccccagagaaaatcaaaaagcaggccacgcagggtgatgaattaacaataaaaatggttaaaaaccccgatatcgtcgcaggcgttgccgcactaaaagaccatcgaccctacgtcgttggatttgccgccgaaacaaataatgtggaagaatacgcccggcaaaaacgtatccgtaaaaaccttgatctgatctgcgcgaacgatgtttcccagccaactcaaggatttaacagcgacaacaacgcattacaccttttctggcaggacggagataaagtcttaccgcttgagcgcaaagagctccttggccaattattactcgacgagatcgtgacccgttatgatgaaaaaaatcgacgttaagattctggacccgcgcgttgggaaggaatttccgctcccgacttatgccacctctggctctgccggacttgacctgcgtgcctgtctcaacgacgccgtagaactggctccgggtgacactacgctggttccgaccgggctggcgattcatattgccgatcctagtctggcggcaatgatgctgccgcgctccggattgggacataagcacggtatcgtgcttggtaacctggtaggattgatcgattctgactatcagggccagttgatgatttccgtgtggaaccgtggtcaggacagcttcaccattcaacctggcgaacgcatcgcccagatgatttttgttccggtagtacaggctgaatttaatctggtggaagatttcgacgccaccgaccgcggtgaaggcggctttggtcactctggtcgtcagtaacacatacgcatccgaataacgtcataacatagccgcaaacatttcgtttgcggtcatagcgtgggtgccgcctggcaagtgcttattttcaggggtattttgtaacatggcagaaaaacaaactgcgaaaaggaaccgtcgcgaggaaatacttcagtctctggcgctgatgctggaatccagcgatggaagccaacgtatcacgacggcaaaactggccgcctctgtcggcgtttccgaagcggcactgtatcgccacttccccagtaagacccgcatgttcgatagcctgattgagtttatcgaagatagcctgattactcgcatcaacctgattctgaaagatgagaaagacaccacagcgcgcctgcgtctgattgtgttgctgcttctcggttttggtgagcgtaatcctggcctgacccgcatcctcactggtcatgcgctaatgtttgaacaggatcgcctgcaagggcgcatcaaccagctgttcgagcgtattgaagcgcagctgcgccaggtattgcgtgaaaagagaatgcgtgagggtgaaggttacaccaccgatgaaaccctgctggcaagccagatcctggccttctgtgaaggtatgctgagtcgttttgtccgcagcgaatttaaataccgcccgacggatgattttgacgcccgctggccgctaattgcggcacagttgcagtaatatgacgccggatgacttttcatccggcgagtttctttaaacgccaaactcttcgcgataggccttaaccgccgccagatgttccgccatttccggcttctcttccaggtaagcaatcaggtctttcagggtgatgatagagatcactttgcagttgtaatcacgctcaacttcctgaatcgcgctaatctcgccgcgcccgcgttcctgacgatcgaggctaatcaacacgccagcaagcgtcgcgccattggcctgaataatctccatgctctcgcgaatcgccgttccggcggtgatcacatcatctaccagcattacgcgtccttgtaacgcgctaccaaccagattgccgccttcaccgtggtcttttgcttctttgcggttaaagcagtacggcaggtccaggtcgtgatgctccgccagtgccacagcggttgtggtggcaatcgggatccctttgtaagcagggccaaacagcagatcgaactcaatgccggaatccaccaacgcttcagcgtaaaaacggcctaacagtgccagatcgcgcccggtattaaacagcccggcgttgaagaaataggggcttttgcgcccggatttcagcgtaaactcgccaaactttaacacctgcttgctaagcgcaaattcaataaactggcgctgatatggtttcatgccttcgctcctcatcttacttttctacagacaaaaaaaaggcgactcatcagtcgccttaaaaatcagtttgccagcgccgccttctgcgtcgttacaatggattgctttcccctcgggccagagccaacaagatgagtagctcttcatgggtgaacggctcgccttctgccgtcccctgcacttcaatgatgcgcccgtcttcggtcatcactacgttcatgtcggtctctgcggcagagtcttcaacgtattccagatcgcaaaccgcttcgccgttcacaattccgacagaaactgcggctaccatccctttcatcggattggttttcagcttgccgttttccaccagcttctgtagcgcatctaccagcgccacgcaggcacccgtaatgctcgcggtacgcgtgccaccatcagcctgaagcacgtcgcagtccagcgtaatggtgaactcacccagcgctttcaaatctactgccgcgcgaagagcacgggcgatcagacgctggatttccattgtgcgtccaccctgcttacctttcgccgcttcacgagcgttacgggtgtgggtagaacgtggcagcatgccgtactctgcggtgatccagccctggccctgacctttcaggaagcgcggcacgccttcttcaatagaggcggtacacaacactttggtatcgccaaattcgaccagcacgctgccttctgcatgttttgtatagttacgagtcagggtaacgggacgcacctgattattgctacggcctgctggacgcatattgaaatctccggcttgaaacaaatgtggctgcgcattatacggacttccggcggttattcctatcctgacaaggcatcgatggctataatccttccacctctccttttataaacaggaacgtctatgatccgcagtatgaccgcctacgcccggcgtgaaatcaagggtgaatgggggagcgcaacctgggaaatgcgcagcgtaaaccagcgttatctggaaacttactttcgtctgccggagcagttccgtagccttgaacctgtcgttcgcgagcgtattcgttctcgcctgacgcgcggtaaagtggaatgtaccctgcgctatgagccagatgttagcgcgcaaggtgagctgatcctcaacgaaaaactggctaaacagctggtaactgccgcgaactgggtaaaaatgcagagtgacgaaggggaaatcaacccggttgatattctacgctggccgggcgtgatggcagcccaggagcaggatcttgacgccattgccgctgaaattctcgcggcgctggatggtacgctggacgactttattgtcgcgcgcgaaaccgaaggtcaggcactgaaagcattgatcgagcagcgtctggaaggcgtcaccgccgaagtggtcaaagtccgctcccatatgccggaaatcctgcaatggcagcgtgagcgtctggtcgcgaagctggaagatgctcaggtgcaactggaaaacaaccgtctggagcaggaactggttctgctggcacaacgaattgacgttgccgaagaactggatcgcctcgaagcgcatgtcaaagagacctacaacattctgaagaaaaaagaagcggttggtcgtcgtctggattttatgatgcaggagttcaaccgcgagagcaacactcttgcgagcaagtctatcaatgccgaagtgacaaactccgccatcgagctgaaagtgttgattgagcagatgcgcgagcagattcagaacatcgaataactcgtaacgccaattcttacttttccgccttcacaaatgccgccactcaaacagagcggcatttttcttccccgcaacattcaattctgttttgcgtgcctgctccagattttgcgatgtttttttgcccagcacactgagaacgtgagatactcacaactgtatataaatacagttacagatttactttctttgcaattgatatcacatggagtgggcaatgaacgaacatcatcaaccttttgaagagataaaactgattaatgcaaacggagcagaacaatggagtgcaagacaacttgggaaactactgggttatagtgagtatcgtcactttatacctgtattaacgcgcgccaaagaagcctgtgagaacagtggtcacacaattgatgaccatttcgaggagatcctcgatatggtcaaaattggcagtaatgccaaaagagcattaaaagacatcgtactctcccgctatgcctgttacctggtagtacaaaacggcgaccctgcgaaaccggtcattgcggcagggcagacttattttgctatccagacccgacggcaggagcttgctgacgatgaagcatttaagcaacttcgtgaagacgaaaagcgtctgtttctgagaaatgagttgaaagaacataacaaacaattggttgaggcagcacagcaagctggggtagcgacagctactgatttcgccatatttcagaatcatggttaccaggggctgtatggtggattagatcagaaagctattcatcagcggaaggggctgaaaaagaatcagaagatcctggatcatatgggtagtacagaactggcggctaatctctttcgagctacccaaacagaagaaaaactcaagcgggatggcgtgaatagtaaacagcaagcaaacaccacacactttgacgtgggtcgcaaggtgaggcaaaccattcaggaacttggcggaaccatgcctgaggagttgccgaccccgcaggtcagcatcaagcagttggaaaacagtgtaaaaattacagagaagaaataacagaaactaaaaactctttttgttgattgagacacccgatgcgtaagccaaggtccaggtgcagtgaacacaatggctaaatattgcacctttcttttccccctcagttttaacctattttttcttatgcattttctcagacaagaagtcagaagaatgcatctctgctacagaaaatagcgatttcacataactacaagttatcaatttcccctccccttaaaaaatctcaatcgtgacaatgcgcacaaatcgctaccctgccagacagatttttagggagagaaccatgctgttacacattttgtatttggttggcattactgccgaagccatgacgggggcgctggcggccggacgacggcgcatggatacatttggcgtaattattattgcgaccgccaccgcaattggcggagggagtgtgcgcgatattctgctgggccactatccgctcggctgggtcaaacacccggaatatgtgattatcgtcgctaccgccgcagtactcaccactatcgttgctcctgtaatgccttacctgcgcaaagtgtttctggtgctcgatgcgctcggactggtggtcttttctatcatcggggcacaggttgcactggatatggggcacggcccaattattgccgttgtcgcggcggtaaccaccggcgtgtttggcggcgttttgcgcgatatgttctgtaaacgtatcccactggtattccagaaagagttgtatgccggtgtcagttttgcctccgccgtgctgtacatcgcgctgcaacactatgtttctaaccatgatgtggtaattatctccaccctggtattcggcttttttgcccgcttactggcgctacgccttaagctgggattaccggtcttttactacagccacgaaggacattaaggttcaaaacctgtgatctgctgggcagccagccaactgcccagcttcttgatttgcgcattttccttccattcaataacctgtctggcgcgtccgcttccagtccccggcagctgctgccagaactgctccgtgctaaataaaagttggctccaggaccgttcatcactggcattaagcgccgcccgggttagcggtattcccattgccatcacccagcgagtaaaaggctgcttacgagccagattaaactgatgccatagctgcgcacttttacttttcgcgatccccggcgtgttctgtaattgctctggcgttaataaaagccaggaaaagatatgttcaaagcgatgagtctgatgcagcgcgcgccaaccggcctcaccaatgccatccagcccaagaacctgttttgcccccagccagactaagcgactaatgaactgttcctgacaaacatcagaagcaaagtagcaggtcaagctgttaaagcggttttctggcggtgtcggttttgtacgttctgcaccgcgccacaccacatcatcaatgcgaggaataccctgaccggcaaggctgacgagaatctgatcaccaggcgcaatatcccactcctgccagcgcctgacggaaccaatattcacccgctggacttttttatcatccagcatgacaggtgcgagactcgcaaccacgcttattttaccgctcttacccaccgcaaactgaattgccttcacttcggcaacctgagctacaggttgatatttccaggccaccagccactctgcctggcccggtagccaatggcgggattctggctctttcgccgctcgtacaactacgccatcggtgacgaagggtaattccgctttccaccactcattgcgtacgcgcgcaacttcatcagcatttttcaccgcacgggtatacgtctgcgttagagtaaaacctgcggtagccagctcttttaaacgatcagacattaactgcggtccatccggccatgcccagacaaaaacgcccagagaattcagcgtgtcgctatcgtcctggcgcatcatcaagccagcaacttttgcgcgggcatttattccccccatttgttgttggatatgcccctcgcgctggagaaatatttccccctgaagcgtactgttggctaaaggcccgctaacggtttgcggcacagcggaaattaagctaactttctgcgtccagtcctcgcctttcaggccattaccgcgactgattgctttgttcagtttcccgtcccgataaaccagggttaccgcaacgccatcaacttttggctgcacccaaagatcgctacgttctcgcatccacagacttaatgcgtttttatccaccattttgcgtacacccgtatgggcaaccggatgcataaccgcaccatttaaaggcggcatcatcacgtcgcggggctcgctcccaaagcagcgttgccactgcgtaagacgggcgcttaactgatcgtaaacaccgtcttccacctcactttttccttccttccagtagtcatcgtcccactgttttatttgctgttgcaggcgggaaatttcttcctgtgctctggctgggctccaggccggacagaccgcccacacagaactttgccagcacaagatacctattaatatcgccatccatactttcatcatcacctccgctgtagatagtcaggcagatatacaacgtgatgaaagcaaagccgagtggcaaaaacggagtctgcgaggacgcttcctgaaaatcgtctttattgcagtgaatgacaggcaaatgcggaagcagctacgcaaaacgcaacaactttgcgcaaaaagtgtgagcaagggctacgtcacatggccgcgccgtgtataataagctcgtatgtaggctttatttcgctaatcacatacgaaagatactcatggctcaaggcacgctttatattgtttccgcccccagtggcgcgggtaaatccagcctgattcaggctttattaaaaacccaaccgttgtgtgacacccaggtttctgttagtcacaccacacgccaaccgcgtcctggtgaagtccacggtgaacattatttctttgttaatcatgatgaatttaaagaaatgattagcagagatgcgttcctcgaacacgcagaagtttttggtaattactatggcactagccgtgaggccattgagcaagtactggcgaccggtgtcgatgtttttctcgatatcgactggcagggcgcgcagcaaattcgccagaagatgccgcacgcgcggagtatctttattttaccgccgtccaaaattgaactggaccgccgtctacgcggtcgcggtcaggacagcgaagaggtcattgcaaagcgtatggcgcaagctgttgcagaaatgagccattacgccgaatatgattatctgattgtgaatgatgacttcgataccgcgttgaccgatttgaagaccattattcgcgccgaacgtctgcgcatgagccgccaaaagcagcgtcatgacgctttaatcagcaaattgttggcagactgaacctgatttcagtatcatgcccagtcatttcttcacctgtggagctttttaagtatggcacgcgtaactgttcaggacgctgtagagaaaattggtaaccgttttgacctggtactggtcgccgcgcgtcgcgctcgtcagatgcaggtaggcggaaaggatccgctggtaccggaagaaaacgataaaaccactgtaatcgcgctgcgcgaaatcgaagaaggtctgatcaacaaccagatcctcgacgttcgcgaacgccaggaacagcaagagcaggaagccgctgaattacaagccgttaccgctattgctgaaggtcgtcgttaatcacaaagcgggtcgcccttgtatctgtttgaaagcctgaatcaactgattcaaacctacctgccggaagaccaaatcaagcgtctgcggcaggcgtatctcgttgcacgtgatgctcacgaggggcaaacacgtagtagcggtgaaccctatatcacgcacccggtagcggttgcctgcattctggccgagatgaaactcgactatgaaacgctgatggcggcgctgctgcatgacgtgattgaagatactcccgccacctaccaggatatggaacagctttttggtaaaagcgtcgccgagctggtagagggggtgagcaaacttgataaactcaagttccgcgataagaaagaggcgcaggccgaaaactttcgcaagatgattatggcgatggtgcaggatatccgcgtcatcctcatcaaacttgccgaccgtacccacaacatgcgcacgctgggcagtcttcgcccggacaaacgtcgccgcatcgcccgtgaaactctcgaaatttatagcccgctggcgcaccgtttaggtatccaccacattaaaaccgaactcgaagagctgggttttgaggcgctgtatcccaaccgttatcgcgtaatcaaagaagtggtgaaagccgcgcgcggcaaccgtaaagagatgatccagaagattctttctgaaatcgaagggcgtttgcaggaagcgggaataccgtgccgcgtcagtggtcgcgagaagcatctttatagcatttactgcaaaatggtgctcaaagagcagcgttttcacagcatcatggacatctacgctttccgcgtgatcgtcaatgattctgacacctgttatcgcgtgctgggccagatgcacagcctgtacaagccgcgtccgggccgcgtgaaagactatatcgccattccaaaagcgaacggctatcagtctttgcacaccagcatgatcggcccgcacggtgtgccggttgaggtccagatccgtaccgaagatatggaccagatggcggagatgggtgttgccgcgcactgggcttataaagagcacggcgaaaccagtactaccgcacaaatccgcgcccagcgctggatgcaaagcctgctggagctgcaacagagcgccggtagtagctttgaatttatcgagagcgttaaatccgatctcttcccggatgagatttacgttttcacaccggaagggcgcattgtcgagctgcctgccggtgcaacgcccgtcgacttcgcttatgcagtgcataccgatatcggtcatgcctgcgtgggcgcacgcgttgaccgccagccttacccgctgagccagccgcttaccagcggtcaaaccgttgaaatcattaccgctccgggcgctcgcccgaatgccgcttggctgaactttgtcgttagcagcaaagcgcgcgccaaaattcgtcagttgctgaaaaacctcaagcgtgatgattctgtaagcctgggccgtcgtctgctcaaccatgctttgggtggtagccgtaagctgaatgaaatcccgcaggaaaatattcagcgcgagctggatcgcatgaagctggcaacgcttgacgatctgctggcagaaatcggacttggtaacgcaatgagcgtggtggtcgcgaaaaatctgcaacatggggacgcctccattccaccggcaacccaaagccacggacatctgcccattaaaggtgccgatggcgtgctgatcacctttgcgaaatgctgccgccctattcctggcgacccgattatcgcccacgtcagccccggtaaaggtctggtgatccaccatgaatcctgccgtaatatccgtggctaccagaaagagccagagaagtttatggctgtggaatgggataaagagacggcgcaggagttcatcaccgaaatcaaggtggagatgttcaatcatcagggtgcgctggcaaacctgacggcggcaattaacaccacgactagcaatattcaaagtttgaatacggaagagaaagatggtcgcgtctacagcgcctttattcgtctgaccgctcgtgaccgtgtgcatctggcgaatatcatgcgcaaaatccgcgtgatgccagacgtgattaaagtcacccgaaaccgaaattaatgttttatgaacccaacacgttatgcacgcatctgcgaaatgctcgccaggcggcagcctgatctgaccgtctgcatggagcaggtccacaaacctcataacgtttctgcgattattcgtaccgcagatgccgttggcgtacatgaagttcacgccgtctggcctggtagccgcatgcgcaccatggctagcgcagcggcgggtagtaacagctgggtacaggtgaaaacacaccgcaccattggcgatgccgtcgctcatctcaaaggccagggcatgcagattctggcaacccatctttctgataacgctgtcgatttccgcgaaattgattacactcgcccgacctgcattttgatgggacaggagaaaacgggcatcacgcaggaagcattggccctggcggatcaggacatcatcattccgatgatcggcatggtgcagagcctgaatgtttccgttgccagtgccctcattctttacgaagcccagcgtcagcggcaaaatgcaggcatgtacctgcgtgaaaacagcatgttgccggaagcagagcaacaacgcctgttgtttgaaggcggctatccggtgctggcgaaagtcgcaaaacgcaaaggcctgccttatccccacgtcaatcagcaaggcgagatcgaagctgatgccgactggtgggctactatgcaggctgcagggtaagtgccatgaaaggtcgcctgttagatgctgtcccactcagttccctaacgggcgttggcgcagcacttagtaacaaactggcgaaaatcaacctgcataccgtgcaggatctactcttacaccttcccctgcgctacgaagatcgcacccatctctaccccatcggagaactactgccgggcgtttatgccacggtggaaggcgaagtgctgaactgcaatatctccttcggcggtcggcggatgatgacctgccagatcagcgacggttccggcatcctcaccatgcgctttttcaatttcagcgcggcaatgaaaaatagcctggcggcgggccgccgtgtactggcttatggcgaagcaaagcgcggtaaatatggtgcggagatgatccacccggaataccgcgtgcagggcgatctcagcacgccagaattacaggaaacgctcacgccggtttatccaacaacggaaggcgtaaagcaggccacgctgcgtaaattaaccgaccaggcgctggatctgctcgacacctgcgccattgaagaactcctgccgccggaactgagtcaaggaatgatgacgctaccggaagcgttgcgcactttgcaccgcccgccaccgacgctacagcttagcgatctggaaaccgggcagcatccggcgcaacgtcgtctgattctggaagaactgctggcgcacaacctcagcatgttagccttacgtgccggagcacagcgttttcatgcccagccgctgagcgccaatgacacgctgaaaaataaactcctcgccgccttaccgttcaagccaacgggcgcacaggcacgcgtagtggcggagatcgagcgcgatatggcgctggatgtgccgatgatgcgtctggtgcagggcgatgtaggttccggtaaaacgctggtcgccgccctcgccgcgttgcgtgcgattgcccacggcaaacaggtagcattgatggcaccaaccgaattactcgccgagcagcacgccaataacttccgcaactggtttgcaccgctcggtatcgaagtgggctggctcgccggtaagcagaaaggtaaagcacggctggcacagcaggaagccatcgccagcggtcaggtgcagatgattgtcggtacacacgccatcttccaggaacaggtgcagtttaacggcctggcgctggtgattatcgacgaacagcatcgttttggcgtgcatcagcgtctggcattgtgggagaaaggccagcagcagggcttccatccgcatcagttgatcatgaccgccacgccgatcccccgcacgctggcaatgactgcgtatgccgatctcgataccagcgtgatagatgagctgccgccaggccgcacgccagtgactacggtcgctattcctgatacccgccgtaccgacatcattgaccgcgtgcaccacgcctgcataactgaaggtcgtcaggcatactgggtttgtacgttgattgaagagagcgaattgctggaagcgcaggcggcggaagctacctgggaagagttgaaactggcgctaccagagttgaacgttggcctggtacacgggcggatgaaacctgccgagaaacaggcggtgatggcgagctttaaacaaggtgagctacacctgctggttgccacaaccgttattgaagtcggcgttgatgtgcctaacgccagtctgatgattatcgaaaacccggagcgtctgggtctggcgcagttacaccagctgcgcgggcgcgtaggtcgtggcgcggtggcttctcactgcgtgctgctctacaaaacgccgctttctaaaacggcgcaaattcgcctgcaagtgctgcgcgacagtaacgacggttttgtgattgcgcaaaaagatctggagattcgcggccctggcgaattgttaggcacgcgtcagacgggtaatgctgaatttaaagtggcggatttactgcgcgatcaggcgatgatcccggaagttcagcgcctggcacgccatattcacgaacgttacccacaacaggcaaaagccctgatagaacgctggatgccggagacggaacgttacagcaatgcgtaaaaggcggcagtgagaagaccgccatttcaggttaccctaccttcctgccggatgcgattcatcaccctacaaattcaataaattatgaatcaatacgcaggcttgataagcgaagcgtatcaggcatttgtctttgttgcggcggcacttctaccgccgcttcatcggttaaccggcaaaaatcggcaacatcaaatacaacttaattaccagcgcattgacgatatcgataaagaacgcaccgaccatcggcaccaccaaaaacgccatgtggcccgggccaaagcgttcagtgatcgcctgcatgttggcgattgccgttggcgttgcaccgaggccaaaaccacagtgacccgcagccagcactgccgcatcgtagtttttgcccatcatgcgccaggtaacgaagatggcatacaacgccatgaagatggtctgtaccaccagaatcgccagcatcggcagcgccaggctagccagctcccacagtttcagccccatcaacgccatcgccaggaacaagctcaagcttacgttacccagcacggataccgcacgctcaaagacgcggtaaaagcccattatactcagaccgttgctcagaatcacgccaacaaacagtacacagacgaaggtcggcagttcaaaagcagtgccagccaaaagttgcgcaacaattttccccaccgtcaggcagatagcaatcagcgcgatagtttcaatcagcaccaagctggtgatcatgcgtcccacatccggcttttcaaacgccgtcgggacttcctggtcatccggaataccgttcggcgtggtggagtgtttcaccagatagcgcgccaccggaccgccaatcaagccgcccagcaccagaccgaacgttgcacaggccatcgccacttccgtcgcattggtgaagccataacgttcaatgaacaatttactccacgcagcgcccgtaccgtgaccgccggaaagagtaatagaaccggccaacagccccatcagcggatcaagccctaacaagctagccataccaatgccaatggcattttgcatcaccaacagaccaacaaccacaatcaagaagatgccaaccacacgcccaccggcacgcaaactggcaatgttggcgttcaggccaatggtggcgaagaaagccagcattaacggatcgcgcagggacatatcaaagttgacttcccagcccatgctttttttcagtactagtagcgccagcgccaccaacaaaccacccgcaacaggttccggtatggtgtatttcttcaaaaaggagacggaatggaccaacttacgcccgagcagcaacgtcagcgttgcggcaacaagcgttgctaaagtatcgagatgaaacatagttactcctttgtatccgcatcactctttcatactcgtcatacttcatcgcgcagtggcaacttcatgaactatgacgggtatcgagttatgctttcctgggtcaaattctcagctgttaatgaacaaatggcatggattttaagcagaaaaataccaaaagttatataaaaaagtgcatttatctcatttaaatatttagatgaggatgtggcaaacgtttgcttttctctttcggtcagctaaaatgcccgctttgctaccacgggattgttttcgatgtctgtttccaccctcgagagtgaaaatgcgcaaccggttgcgcagactcaaaacagcgaactgatttaccgtcttgaagatcgtccgccgcttcctcaaaccctgtttgccgcctgtcagcatctgctggcgatgttcgttgcggtgatcacgccagcgctattaatctgccaggcgctgggtttaccggcacaagacacgcaacacattattagtatgagcctgtttgcctccggtgtggcaagcattattcaaattaaggcctggggtccggttggctccgggctgttgtctattcagggcaccagcttcaactttgttgccccgctgattatgggcggtaccgcgctgaaaaccggtggtgctgatgttcctaccatgatggcggctttgttcggcacgttgatgctggcaagttgcaccgagatggtgatctcccgcgttctgcatctggcgcgccgcattattacgccgctggtttctggcgttgtggtgatgattatcggcctgagcctaattcaggttgggttaacgtccattggcggcggttacgcagccatgagcgataacaccttcggcgcaccgaaaaatctgctgctggcaggcgtggtcttagccttaattatcctgcttaaccgtcaacgtaacccttacttacgcgtggccagtctggtaattgcgatggcggccggatatgcgctggcgtggtttatgggcatgttgccagaaagcaacgaacctatgacgcaagaactgattatggtgccaacgccgctctattacggtcttggcattgaatggagtctgctgctgccgctgatgctggtctttatgatcactagcctggaaaccattggcgatatcacggcgacctctgacgtttccgaacagccagtgtccggtccgctgtacatgaaacgcctgaaaggcggcgtgctggcaaacggcctgaacagctttgttagcgcggtgtttaacaccttcccgaactcctgcttcgggcaaaacaacggagtgatccagttgactggtgttgccagccgctatgtcggttttgtcgtcgcgctgatgttgatcgtgctgggtctgttcccggcagtgagcggttttgtacaacacattccagaaccggttctgggcggcgcaacgcttgtaatgtttggcaccatcgccgcctccggtgtgcgtatcgtttctcgtgagccgctgaaccgtcgggcgattctgattatcgcgctgagcctggcggttggtctgggcgtgtctcagcagccgctgattttgcagtttgcccctgaatggctgaaaaacctgctctcctccgggatcgccgcgggcggtattactgccatcgtgctgaatctgattttcccaccagaaaaacagtaattcactggcggcggtaagataattaccgccgcagtctcacctctttaaccattcccgccttgaggattgcgcgtaaatcgtgcataactcccttatgtgcatttcacgggatggaagaccatgaaatttattgggaagctgcttctctacattctcatcgctctgttagtggcgatcgctggcctctattttcttctgcaaacccgctggggagcagaacatatcagcgcatgggtttccgagaatagcgactatcatctggccttcggggcgatggatcaccgtttttccgcgccatctcatatcgtgctggagaacgtcacgtttggtcgtgatggccagcccgcgaccctggtggccaaaagtgtcgacattgcgctaagcagtcggcaactgaccgaaccacgccatgtcgataccatcctgctggaaaacgggacgctgaatctcaccgaccagaccgcgccgctaccgttcaaagccgatcgtctgcaactgcgtgatatggcgtttaatagcccgaatagcgaatggaaactgagcgcgcagcgggtaaatggcggcgtagttccgtggagtccaaaagccggtaaagtgctgggtacgaaggcgcagattcagtttagtgccggaagccttagcctcaatgatgttcctgccaccaatgtactgattgaaggcagtattgataacgatcgcgttacgctgactaacctgggtgccgacatcgcccgcgggacattaaccggaaacgcgcagcgtaacgccgacggcagctggcaagtggaaaacctgcgcatggcggatatacgtctacaaagcgaaaaaagcctaaccgacttctttgcgccattacgctctgtcccgagcttgcagattggtcgcctggaagtgatcgatgctcgtttgcaaggtccggactgggcggtgaccgacctcgatctcagcttgcgcaacatgaccttcagtaaagatgactggcagacacaggaaggcaaactgagcatgaacgctagcgagttcatttatggtagcctgcatttatttgacccgattataaacacggaattttccccgcagggcgtagcgctgcgccagttcaccagccgctgggaagggggtatggtcagaacgagtgggaactggctgcgtgacgggaaaacgttgatccttgatgatgcggcaattgccgggctggaatataccttgccgaaaaactggcaacagttgtggatggaaacgacacccggttggttaaacagcctgcaactgaagagatttagcgccagccgcaatctgatcattgatatcgaccctgacttcccgtggcagctcaccgcgctcgatggttacggtgccaacctgacgctggttaccgatcataaatggggcgtctggagtggcagcgcgaatctgaatgccgccgccgcgacattcaatcgtgttgatgttcgtcgcccgagcctggcgctgaccgccaacagcagcacggtgaatatcagcgaactgagtgcatttactgaaaaaggcattctggaagccaccgccagtgttagtcaaacgccacaacgtcagacacatatcagcctgaatggacgcggtgtgccggtgaatattttgcaacagtggggatggcctgaattaccgttgactggcgacggcaatattcagcttaccgccagtggcgatattcaggccaatgtcccgttgaaacctacggttagcgggcaattgcatgccgtgaacgccgcaaagcagcaagtgactcaaaccatgaatgctggcatcgtttccagcggtgaagttacaagcacggagccggtgcggtaaacatcaatctcgccgggtacgactcagacgtacccggcattccatcaatagattacaacgtaattgtcagcgcattcccttgaggcttcaccaccagcccctgctcactttcagcctggctaccgtcttgcagaccatttactttcacaacattgcgcaggcacagtgtccagttcttcgcctcgcccgcaccagtcacagtaatcgtgttgccagtacgtgctgcttttaaagtaaagatcacgcttccgtcagcagcgggcacttcacagacggcttcatgcccgtcttgcagattgaagaggtggaatgccgtgccttcgtgccacacgtaatcgggacgttgatcgttgttgcccagcgccagtagagtgttatcacgcacataaacgggcagactcaggaagccgtgctgctgtttatgccagcgactaccgtcgagttcatcgttgtgccacaggtgtgtccagcgaccttccggcaggtagaactgcacatcgcccgcttcagtgaacaccggcgcaaccatcacgttgtcgcctaacatgtattgacggtcaaggtaatcacaagccggatcgtccgggaactccatcatcatggcccgcatcatcggcgtaccccgcgcgttcgcacgcgcagcttcacgatacagatacggcatcatgcggcatttcagttgcgtgaagaagcgcaccacatcacaggactcatcatcgtaggcccacggcacacgataagatttgctaccgtgtaaacggctatggctggagagcaaaccaaacgcgcaccagcgtttgtaaacgtgcgccggagcggtattttcaaagccgccgatatcgtggctccagaagccaaaaccactaaggccaatagacaaaccaccgcgcaggctttccgccatactttcgtagttagcgtaacaatcgccaccccagtgtaccgggaatttctgcgcaccgacggaggcgctgcgggcaaacaagacagcttcttcctcaccaacggtgtccttgagcacgttccacaccagttcgttgtagatgtacgcataatggttatgcattttctgcggatcggaaccgtcaaaccactgaacatcagttgggatacgttcgccaaagtcggtcttaaagcaatcaacgcccatcgcgaccagacctttcagtttgtcggcgtaccatttgcaggcatccggattggtaaagtcataaatcgccagacctggctgccatttatcccactgccataggctaccgtccgggcgtttgagtaaatagcctttctcttgtaactctttaaagacgggggatttttgaccgatataggggttaatccagacgcagattttcagtcctttcgctttcaggcggcggatcatcccttccgggtcagggaaagtcagcgggtcccactcaaaatcgcaccactggaaggctttcatccagaaacagtcaaagtggaaaacatgcagcggcagattgcgttccgccataccatcgataaagctgtttaccgtcgcttcgtcgtagttggtggtaaaactagtggttagccacaggccgaaggaccacgcgggcggcagcgccggacgaccagtaaagcgggtataacgatcaagtaccgctttcggcgtcgggccgtcgataacaaagtattcgagatattcactctcaacgctgaactgcactttggagactttctcgcttcccacttcaaaagagacacactggggatgattgaccagtaccccataaccacggttagtcatgtagaacgggatatttttatacgcctgttcagtacttgtgccgccgtcccggttccaggtctctaccgtctggccattgcgcaccagggcagtaaagcgctctcccagaccgtaaactgtttcgccaacgccaagatcaagccgctcaaacatataattgcgttgattattcgtgtcctgcacgtagccattatttttcacctgactaccggtaatacgttcgccgttgcgcagaaaatccagactccagaactcacctttgctgacacgcgcgcttaagttgccacttttaaactcagcataacgttctgtgttttcgattgtgaccttcacgtcctgcaaaatattgagcggataatgaggaccgttattcagcgccccctgaaaatgctcaatccgcacaccgacaataccttcctgtggggagaaaaagcgcaacgtaaataaaggcgtatcaagctgccaggtacgttcacgcacatcacggggggcagcatagaccaccatttcattatcctgctgttcaacctcgaacacctgaagcgggtgaatcaaattgaggccaggttgaatcaaccagtttccatcgctaattttcattgccgttccttagttctgcacttcttgagaggtgaattgttgctggcaacggcgtttaccctgagccagctgttccataacggttttcagattgtgcgtcgtgagactgtagtagcgtttagcgataatcgcgctcagcaaataacagatcgccggaacaatcgtgaatagcgcaataatgatgctaatcgtggcgctgttctgcgctttttctgccgcatcatatccgccataagccagcatccagccgataagagcgccgccgaaggccaaccccagtttgagcacaaacagcgtgccagcaaaactgatcccggtcaggcgtttaccattgcaccactcgccgtagtcgacggtatcggacatcattacccactggataggtgtcaccagttgatgcaacacaccaatcacgaagatgaagacaaacatagtgatgctggcctgcatgggaacaaagaacatcgcgaggctaatcactgccagcagggcgttcgtccaccagaagatagtgactttacatttccagtcggtcagaggttttgccagtgcggaaccaatcaggttacccacgcaataagtggtgagaaaagcgacaaacacttccggcgtgcccaaaatccatgtgacgtaatacatcatcgccccaccgcgtacgcacaccgccaggatattgaaaatggttagtaaaccgacaatccgccactggtcgttttgccagatatcacgtaaatcttcccgcatagacgttgttgtaggtggtgcttcaacgcgttctttagtggtgaagaaacaaaatgccagcatcatgaatgccaccacggaaaggaccgcgataccgccctggaaaccgagtggtttattatcaccgccaattaaattaaccagtggcatcatcagaacagtagaaagcatgcctcccgcggtcgccagcacaaaacgccaggattgcaggctgatacgctgagtcgggtcattggtgattacaccacccaatgcgcagtaagggatattgacgacggtataaagtaaggtaagtagggtgtaagtaattgctgcatagatcattttgccgttcatactgagatctggcgtgctataggccagtacacagacgatcccgaatggcagtgcgccaaacagtacccacggacgaaatttaccccagcgagagcgcgttcgatcggccaacaaccccatgcaaggatcggaaatcgcatccagtgcacgagcgaccaaaaacatggttccgacaaaaccggcaggaatgccaaaaatatcggtataaaagaacatcatatataacattacgttatcgaaaataatgtggctggcggcgtctcccatgccataaccaattttctctttaacggacaacacttcactcttcatctgcttttccttgatgctataggggtgctgagaccgataacgcattttgtaaaccatccctgtgagagcgaatattccgatatctggttattaatttatgattcttgttttatgtgatcgtggtagcgttaattccgctcatatatcattgtaaaatatgggttttatatgaactataatgctttcgtgataatacgctgcgtgtattaggcggaaaaaactgatctgggggatgtagaaactcaaggaagtagctataatgcgccccgcctccatgtagcaatcgaggcgcggaagatcgtcgtctccggtgaggcggctggacttcaaatccagttggggccgccagcggtcccgggcaggttcgactcctgtgatcttccgccaaaatgcctctcctgacgttctccaaccccttgtaatactgtcaatccagatattttctactgctcaatattcaatcggcttcaggaatacctggtctaaggttttgtgatggacgatgagcggctgaagaatccgcctgtcggttcttctgtcctcgaacgcatccgcgatattcacgccagtatgcgccgtgtttatttgcaggtgatttgcccccctgctgactctcagccaactgtatcgccattaaggtgaagatgttgttttactcgccccagaacacccttttttatacgactattctatttctttaaccgctggcgaaaaaaactgactataaacttcaccaataatcagactgccatcaagattaatttgttcatttaatatatcaaatcaacttgttttatttttactatcaaaaatagctcattgccttactataattaatatataaattcggtaattaattcttaacatgcttttactaataatctcaattgctggccctataatattgcgctagcattgctttctggttgtatcagcgatactcaaaaattcttaatacaatactcattcgactggtacttatttgtaactcagttatattttttcgcccggtgattcagaagaatgcaaaaaacggctaccactccaagtaaaatacttgatctcactgccgcggcatttttacttgtcgcctttctgacgggtattgcgggcgctcttcagactcctaccctaagtatattcctcgcagatgaactgaaagcccgtcctataatggtaggttttttcttcaccggtagcgctattatgggaattctggtcagtcaatttctggcaaggcactccgataaacaaggcgaccgtaaattactgattctgctatgttgcttatttggagtgctggcctgcacgctttttgcgtggaatcgcaactacttcattctcctcagtacgggcgtacttctgagtagttttgcttccaccgcaaacccgcaaatgttcgccctcgcccgtgaacacgccgacagaacaggccgtgagacggtcatgttcagtacatttttacgtgctcagatcagccttgcctgggttatcgggccaccgctcgcttatgaactggcaatgggatttagttttaaagtgatgtatctcaccgctgccatcgcatttgttgtttgcggactgatagtctggttgtttttgccaagtatacaaagaaatattcctgtcgttacccaacccgtagaaattttaccctccacccacaggaagcgggatacgcggctactttttgtggtctgtagtatgatgtgggcggcgaataatctctacatgataaatatgccgctatttattattgatgaactgcatctaaccgataaactgactggagaaatgattggtatcgctgccggtctggaaattccgatgatgttaatcgcaggctattacatgaaacgtattggcaagcgactattaatgctcattgctatcgtgagtggaatgtgtttttacgccagcgtactcatggcgacgactccggcggttgagctggaattgcaaattcttaatgccatcttccttggtattctctgtggtatcggcatgctttattttcaggacttgatgcctgaaaaaataggctctgcgacaacgttatatgcaaatactagtcgcgtcggctggattatcgccggctctgttgacggaattatggttgaaatctggagctaccatgcgttgttctggctggcgatagggatgttgggtattgcgatgatttgcctgctgtttattaaagatatttaactcaccagtctgggctaagaaaaatcggcgtggcgcaaacagagccatcctcgccatttttgctatcatgcctgcatacataaacgacaaaacagtatgcagagggaaaaatgggttccaccagaaaggggatgctgaacgttctgattgccgccgtgttgtggggaagtagtggggtctgcgcgcaatacatcatggagcaaagccagatgagcagccagtttttgactatgacgcgtttgatattcgccggtttgattctactgacgctgagttttgttcatggcgataaaatcttttctattattaacaatcataaagatgccattagcctgctgattttttccgtggttggcgcgctaactgtacagctcacttttttgctaaccatcgaaaaaagcaacgcagccacggcaacggtgctgcaattcctcagtccgacgattatcgtcgcctggttcagtctggtgcgtaaaagccgcccgggcattctggttttctgcgctattttgacaagcctggtcgggacttttttattggtgacacacggtaatccgacgagtttaagcatctctcctgccgcgttgttctggggcattgccagcgcatttgctgctgcattctataccacctatcccagtacgctaattgcccgctatggcacgttaccagtcgtcggctggagtatgctgattggcggtctgattctgttgcctttttatgccagacaaggaacaaactttgtcgttaacggcagtttgattctggcgtttttttatttggtggtcattggtacgtccctgacatttagtctgtacctgaaaggagcacaattaattggcggtccaaaagccagcattttgagctgtgcagaaccattaagtagcgcgctactctctttgctgttgctggggatcacgttcacattaccggactggctgggaacgctgctgattctgagtagcgtgattttgattagtatggattcccgtcgccgcgccagaaaaataaatcgtccggcgcggcataagtgagaattaccagccaggcaccgcgccaccgttaaaaatggtttctgccgctttagcgacttcgggactttgataagattgcagaaattccttcacgttttctgcattcttattatcttcccgtgccaccaaaatattcacatacgggctattcttatcttcaataaatacgctgtcgtgcaccggagaaagcccggtctgctgaatgtaagtggtgctgataatcgctacatcaactttgggatcatccagtacgcgcgggagctgcgccccctcgagttccataatctgcaaatgacgaggattatcggttatatccagcgcggtaggtaataacccttttccctctttcagagtaattagcttctctttttgcaacagtaaaagtgcgcgaccaaggttggtcgggtcgttggggatcgccactgtcgcgccttcttttatttgcgccacggttttgatttttttggaataacccgccatagggaagacaaacgtatttcccaccgctaccagtttataaccatgcgcctgattatcttgttcaagaaagggtcgatgctggaagacattcgcatcaagttcgccatgatttgtcgcatcgttcggtagcaagctaccgctaaatcctaccagttcaacatcgaggccatatttctcttttgccacctttttagcgacttccgcgacatcttgttctgcgccatttataacgccaactttaatgtgttttgcatcgctgctactctggtcgcaacctgccagcagaattccggccagcaataatgcggcccctgtccgtagatgatgtgttgtcagtttcatttttttatccttttattaatgattacctgactatagcggtaaggtcgctgcggtttaaaaaacgaaacgctatcgataagaataaaaaggaataaaagtggaatataaagtctggcacttcttactgaccacgcaagcgcgtttcgtacagcatgatgagagcgatgaaagcaaactacacttatgcttcattcgatacacatttgtaaaaggttgaatccatgaaaccaacgacactactgcttattttcacttttttcgctatgccaggcatcgtatacgccgagagcccttttagcagtctgcagtccgcaaaagagaaaaccacggtattacaagatttacgtaaaatttgcacgccacaggcgagtttaagtgatgaagcgtgggaaaagttaatgttgagtgatgaaaacaataaacaacatatacgcgaggccatcgtggcgatggaacgtaataatcagagcaattattgggaagcgttgggtaaggtagaatgcccggatatgtaagaacagcaacaactactgaccaacgcttctttacctgatatcaggatttcttcattttcacctttgcagtaaccaacaatgcagtcagcaacatcaatgtgccggacaacatcaacgggctagtcagaccaatattatccagcgcataaccgccgattgccgcgccacaggtattagcaagctgaataaccgccacctgaatagacccggctttttctgcctgatcggccaggctgcgggtgatccacgtactccagccgacgggaaccaatgcaaaagttagcccccagataatcgccacgccggtagcaacgattttatcgcttccccacaacgtcagtaccaacgcactcacagccagtattaacggcgcgcctgctaaggccagttttacgctacgtttaagaatgaagctgctaaggctcgtaccaataaagctggcgataccaaaactcaacagcaccagcgttaagccatccacgccgaatcccgccaggttcatatacaccgggcgaatatacgtgaagaaagcaaactgcccggcgaaagacatgaagatggcgatcatccctgccatcacacccggacgttgtaataagcggaaagtattttgtttctgatggctgggttcgcctggcagactaggcaaacttttgataatccagaaaatacacagcacgcccatcaccgccgccgcattaaagacattgcgccaaccgataagctcgcctaaaaaactgcccaacggcgcggcaatcaccagcgcaatagaaaccgcgccgaagatcacgctcagcgccttcggcaccgtacgcggcggcaccagacgcatggtcaggctcgcgctcatcgcccagaacccgcccagcgccagccccagacaggcacgaccgattaaaagcaaactgaaactgttagcaaaggaaaccagcaagcaggagagcgtcagcaaaacggcaaacaaaataacaacgtagcggcggtcagtagcctgaattgtctgggtaataaacaaactggcaaacattgccacaaaggcggtcacggtcacgctttgcccggcaaccccttcgctaatgcctaaatcctgggccattggcgtcaacaaactgacgggcaaaaactcaacgataatcagacaggcgacacaaaacgccacgctgaaaacggcactccagttcggtcgggtgatggcatccgcgccgcggttttcggcaataaattcactcatggtgttacccgtggcatgtttcaggggaaaagcgctccactttaacatactaatgtgactcgcatttaacgtttttgcaacttttacggtgttgctactgctggagttaagatcgaaacggaacagggcaaagattaccggatgcggcgtgaacgtcttatccacccgacaggtcaggcgcggtctgtaggctgataagacgaaacggtttcaatgcaaccagtgaacgccctcggcaggctgaaagaacgcgttatagcgcatctgaaaagcattaatatcctgcatttcaggttcggtttcgcgcagaaaacctagcgccagcctgacctgagcgtcggtaatcggcgcggcgaggcgagctttttgtaaaatccgatgccattgcagcaggttctgttcgctaccatcgacaatgacaatttgccagatgagcaacacctgcgcggcgttttgcaggtggctctcatccggacgatgcaaataacgtaaaaattcgtcaccagcactctttcccatttgatcgaccatgctctccacgggtacgacatcgatgttcagccgatcgctgagacggcgaatcgcttttctggccccggatgtcagcacccgaaaaccaaccacaaacactaccgccagcgtggcgagcattatccagatcatgagttctcctgcgtaatcagaactcatgatatctggaaaccctcgccagttattaatccaccagaataatcttcagtgcaaacagagctgcgaccaccaccacacacaggttcagatcgcgccagcgcccggtgcatactttcatgatgcagtagctcataaagccgagtgcaatcccttcggtgatgctgaaagtaaagggcatcatcaccgtggtaataaacgcaggcacgctttcggtaaaatcatcccagttaacgcgcgccaggctgctagtcatcagcacgccaacaaagattaacgctccggcggttgcgtaaggaggaactatcgccaccagcggactgaagaacataaccaacaggaacataacgccaaccacaaccgcagtcagccccgtgcggccaccgactgccacaccagaagtactttcaatataggcagtaacagagctggtgccgataaacgcacccgccacgctactgacgctatcaacatacagcgccttattcatattggggaatttaccgttaccatctattaagcccgctttatcagttacaccaattaatgttccactactatcaaataggttgatcagcataaaggagaaaatgataccggcgagttcaagtgttaacgcgccgctcaaatctacttcaccaatgacgccgctaatatcaggcggaatggaatagacgccgctaaaatgaacatcaccgaaaaataatccacagcaagacgtcaccacaatagaaaccagcaccgcggcatgaaaatgacgactactcaacacggttataataaaaaaccctaaaatacctaacaacacgccgtgagaacttaaatcgccaatcatcaccagcgtgtctttattggcgacaataacgccagtattttttaatcccattaaggcgataaataatccaattccgctggtgataccaatacgtaaacttaagggaatgttggagatcatccagtaccggatacgaaacagcgtgagcaaaaatagtccaactgcgccccagaatattgcgcccatcccggtctgccaggagatgcccatcgcccccacgaccacgaaggcaaagaaggcgttcagccccattgccggagccagcgccacgggtaagttagcaaatatccccatcgcaatactgccgataccggcaatcaaacaggtggtaacaaacaccactttcgggtccatttgtgccgcgccgaggatttgcgggttcacaaaaacgatgtacaccatggttaaaaaagtggtcatccccgcaatcaattctgtgcggacggtggtcccatgctgaggtagtttaaataatcggctaagcgtcccactttcattactcacgtaatcggtattgtcattattcatttttttgtccattggaggagatttaatcccttgcttttgtaaaacaaatgacaacaacggttcagtgataattatcacatttcaattgcacattaatggatattctttaataatctcgcgacgtttctttatgataaataataatcaaattgataaaatcaaaatgagaaaaatatgaataattctattaaccataaatttcatcacattagccgggctgaataccaggaattgttagccgtttcccgtggcgacgctgttgccgattatattattgataatgtctctattctcgacctgatcaatggcggagaaatttccggcccaattgtgattaaaggacgttacattgccggtgttggcgcagaatacactgatgctccggctttgcagcggattgatgctcgcggcgcaacggcggtgccagggtttattgatgctcacctgcatattgaatccagcatgatgacgccggtcacttttgaaaccgctaccctgccgcgcggcctgacgaccgttatttgcgaccctcatgaaatcgtcaacgtgatgggcgaagccggattcgcctggtttgcccgctgtgccgaacaggcaaggcaaaaccagtacttacaggtcagctcttgcgtacccgccctggaaggctgcgatgttaacggtgccagttttacccttgaacagatgctcgcctggcgggaccatccgcaggttaccggccttgcagaaatgatggactaccctggcgtaattagcgggcagaatgcgctgctcgataaactggatgcatttcgccacctgacgctggacggtcactgcccgggtttgggtggtaaagaacttaacgcctatattactgcgggtattgaaaactgccacgaaagttatcagctggaagaaggacgccggaaattacaactcggcatgagcttgatgatccgcgaagggtccgctgcccgcaatctcaacgcgctggcaccgttgatcaacgaatttaacagcccgcaatgcatgctctgtaccgatgaccgtaacccgtgggagatcgcccatgaaggacacatcgatgccttaattcgccgcctgatcgaacaacacaatgtgccgctgcatgtggcatatcgcgtcgccagctggagcacggcgcgccactttggtctgaatcacctcggcttactggcacccggcaagcaggccgatatcgtcctgttgagcgatgcgcgtaaggtcacggtgcagcaggtactggtgaaaggcgagccgattgatgcgcaaaccttacaggcggaagagagcgcgagactggcacaatccgctccgccatatggcaacaccattgcccgccagccagtttccgccagcgactttgccctgcaatttacgcccggaaaacgctatcgggtcattgacgtcatccataacgaattgattacgcactcccactccagcgtctacagcgaaaatggttttgatcgcgatgatgtgagctttattgccgtacttgagcgttacgggcaacggctggctccggcttgtggtttgcttggcggctttggactgaatgaaggtgcgctggctgcgacggtcagccatgacagccataatattgtggtgatcggtcgcagtgccgaagagatggcgctggcggtcaatcaggtgattcaggatggcggcgggctgtgcgtggtacgtaacggccaggtacaaagtcatctgccgttacccattgccgggctgatgagcaccgacacggcgcagagcctggcggaacaaattgacgccttgaaagccgccgcccgtgaatgcggtccgttacccgatgagccgtttattcagatggcgtttctttctctgccagtgatccccgcgctaaaactaaccagtcaggggctatttgatggcgagaagtttgccttcactacgctggaagtcacggaataataaaaaaagcccggcgtcatgccgggcaaaagtcaccagttacgtttatgccactgtcaactgctgaatttttttctcgcggcggattttgcgttcttccattaccgccactatcgccatcaggcagatacaaccaatcgcggcgatatccagcgcggcgaaggtgcctgcccagccggtaaggccgaataccggcgtcccatcggcaatcattcccagacctaacttggcaaagctgtcaccaatcaggtaagcaaaggtgcctttaataccatcggcagcgccaatcgcttttttaggtacaaagccaacagcagccacaccaatcaacaattgcgggccaaagaccaggaaacccaacgcaaagagagaagccagatagatatattcgttactggcatgttgatacacaccgagcgtggcgataatcagcgccagcgcgatgcaggccaccaggccacggcgaccgttcgccaggtcagagagccagccccacagcagcgtaccgaccagcgcaccagcttcaaacagcgtaaagccctgaatcgccaccgctttagagagtttcagttcctggaacgcgtatacggtactccactggtcgataccaatacgtaccacatagaggaaaatgttggcgaagcacagcagccagatcactttgtttttcagcacatactcaacaaagatctgccacttggtcatatcggtagattctgtctctttgtcctcttcgctgatctcctcgccgaacagttcttcagctttgccgaggccataagattccggggagtcgctgccgtaacgcaggccgataaaaccgacaatcagcgcgataatgctcgggaagataaacatgccgatgacatggccatcgaacaggtaatttgccccgaacagcgccacacctgctgcgcctgcaccgccaaggttgtgagaaatattccagaaaccgaggaatgtcccgcgtttacgacgcggcgtccatttggtgatggtggagtaactgcagctaccgccggtactctggaaaaagccgcttaaggcgtagaaggcaatcatcaggaacaggctaacgctgccgctgcccatactggcactgaagcccagcatacaaatagcagagaggatcagcatgaacggcaggaattgtttggtgtttttgccgtcggcgtagtaggaaaccagcgttttacccacgccataagtgatggagaaacccaggccgatcatccccagctgcgtcatgctcaacccgtaggtgctaatcatatcgttctgcgcgatgttaaagttcttgcgaatcaggtacatcgtcaggtagccgataaagaccaccaggtaggattgcatgaacggtttgaaccacattttgcgccgcacttcgagcggaaggtccagggtcggcttgcgaacctggtttaagaaagccagcatgggttactcctgaaatgaatacctgcgtgaggcatgcattgtaaaaatcagcagcaaatcaggcctgagatagcgtccaggcaaaacctggaaaatttcttagttttgccggatatgaagtgaaaaggtgagatgcatcacgcttcgcgcggtgtctgggcgttcaaaaagggcagtaacagcagtgcggaaatcccggcggcgatagagataaccacaaaaaatccgctccagtgccaggtatcgagtactttcgccagcggccaaccagcaaggctcgcccccagataagcaaacaagccgacaaaccccgtcgccgcccctgccgcctctttgtgggaacactctgccgccgccataccgattaacatctgtgggccaaagacaaaaaaaccaatggtgaagaagcaggttgcctgcatcacgtagctggcaaatggcatcagccacagggagccgacactaagcaaaattccggcggcgaaaatcaaattcatcggccctcggttgccgttaaacaatttgtcgctgccccaaccggctaccagcgcaccgataaatccgcccagttcaaacatcgtcactgccgtattcgccgtgaccagatcgacgcccagtgtctcggacatatacaaattgccccagtcgttgatcgccgcccggaccacatagaccagcacatagcaaaagctaagcagccagatatacggattcagcaacacatatttggtgaggatctctttacgcgtcaaccctgccccttcttgttgttgagcaatttccagcgcgtcgtgtcgccattcaccgaccgccggtaaacctaacgcctgcgggcgatcgcgtagccgccagcagagaaaaatccccacgactatcgccatacaaccagcaatcatcatcccggcacgccagccgtaatgcagcgcagccgctgccatcacaatgggaatgagtgcgccgccgacgttatgcgccgtgttccataatgcccaccaaccgccgcgctcggtacgactataccaggccgttaacagacgcgcacacaccggactaccccagccctggaaaaaggcgttcagcacccagagcacggcaaacgcccataggctcgtgctgaagccaaacagaatgttgataatgcccgtggcgataagccctatccccataaaataacgggcattactgcgatcgctgacaatgccggagacaaacttgctcacgccataggtaatgtaaaacagggtcgctaacaggccgatatcgctacggctgagcacgccgttagcaaggatttctggtacggcggcgttaaaacttttccgcgtgaagtaaaacagcgcgtaacccagccagatggtcagcagaatatgccgacgccagtagcgatagcgggcatcaatttcatatttatcagtcattaatggcgcatcggcaggcgctttcagaaacggcaacatcatcaaaccttagacatagcgttgaggtagagaaacgctgacacgcgtgccgtgcagacaggaaatgtgtaatgtgccacccagcgccgttacgcgctcgcgcattccggtgaggccaaaaccttgttgcccggaacccggcggcaaaccgctgccatcgtcttcaataaccagcatcaaccgttcatcctgctgccagccttgcagggtgaccgcgctggcatcagcatgtttcacaatgttgttcagcccttcctggcagacacgaaacagcgtcacgcgctggttttcgcttaacgcactttcatcgattcgccattcgagatggctgacaataccgcgcccttccagctccatttcccgcatcagactgcggatggcctgctccagggtgagatcatccaactggcgcggacgtaaccgacccaacaaacggcgcaccgcgtcgtaaacgcccaggcttagttgttcgatgagctgcccgctctgcttcacgctggcgttatctgccgccagccgctgaacaatgcccgcctgagtacgaatagcagtgatggtctgaccgatatcatcatgcagctcacgcgccacatcacggcgcacgctctcttcggtttccagcaaccgttcagccagatgctgattgcgcgccagttccttttgcaggctctggttaagttcacgcaaccgctggatgccagcgccaagcaacaaccctgtcagactttgcaccagcaggctgagcaataaatccaccggatgatcgcgccaggtttgactggcgatcagcgcgatggcgttcatcaacgtcgcaatcagcgccccttgccaaccatagtgccaggccagcgcgataatcggcagcgccagacagaatggcgtaaagcggctcagttcgtccggcaatcccaactggagccagagactgataacaaacagcagcaagtaccagaccagatgtcgcccgcgccagttgattggctgagaaaccagactcggaccgagcggcagccaggtgttattggcgagatagtgccagaacaccagacatatcggggccagcgtcaggccgccagttaaagtcagcaacagcgcattccagctctctttgccgtgccaaagccagggcaggctctgcaacaacgccgccgccgttaacgccgccccctgtaacagcaaggtgcgccagtcacgctgatggcgatagcggctgatcagcgctacgggcagtaacgtcagtaaactaccgatcatcaataacggaaaatgggttaaaccgaccgcctgcgttagccagtaaatcagcagccactccgcgcccagcaatacgggccagtatccgcgcgggcattgcagcattagccccagacgcagaccaaacggaaataacagcaccgccatatcagggcgctcaaccagatgcaggctgatactccacaggcaaaaccatgcggcagagaagataaaaaagcaggcaataacggtaattaagcgggagaacaacgtcttcatcaccagccatcaaacatgcggcgcgccagctctacgtcgttactgacgcccagtttttccatcagattggcgcgatggacgtgtaccgttttcggactcaagcccagttcggcggcaatctctttcaccgccattccttgcgccagtttttccgccacctggcgttcacgtttggttagcgggtcctgacgaccggatgccagtttaatggcaatatccggcgtcagataacagccgcccgtggcaaccgtatgcaccgcagcaatgagttcatccgggctacagcgtttggaaagaaagccgcgtgcccccgcgttaagcgcctgctcaaccagcgcaggactgtcgtgaacggagagcataatcgtcgccatacctttcggcagctggcttagcagctccagaccggagatatcgggcatggagatatcgcaaatacacacctgcacaccgcgccccggcagccccgccagcgcctcgcgcccgctaccaaactcggcaactacctgcaaatcaggttccagccccagcagctgcgcaaagccggagcggacgatgaggtgatcgtctataagggcaacggtgatcatggtcttgtcctggcgggtaaaaaaaatacgcgcttaccttaacgataagcgcgatgttgttcaagccttgagcggttactgaaaaaacaccgcgatcttgttaaacatcgtcggatcggactgattacgctgcactttcacgacatcttccagcttatcgatttggcttatcatctgctccagacgctggtcgtcattgaccagtagccagatatggcttttgtcgctgtcctgaatcggcagacaaagaatgccttcaacgttaaaagcgcggcgggcaaaaaggccacaaacgtgggtcattacgcccggatggttgcgaacggtgagctccagaattacgttgtcatgagttgtgttttgcatggcttattcccccaccatttcagtattcgccgcacctggcggcaccatcgggtaaactttttcttcggcatcaatgcgcacatggatcagcgccgggccagggcgattgatgatttcctgcaaactagcctgcggatcggcttcgttattcaaatcacaggtttcgaggccgaatccggcggcaatctgcataaagttgattttgcccggataggtggcggcaaaaacgccttgctcgtagaacagactctgttgctgatgcaccagccccagcgcttcgttgttcatcagaatgattttgacatccagctgattttcactggcggtcgccatctcctgaatattcatcatcaggctgccgtcgccggagaaacacaacactttgcgatccgggttcgccagcgcagcgccaatcgccgcaggcaggccaaaacccatcgtgcccagcccaccggaggtcagccactggcgtgggcgattgagcggataagcttgcgcggtccacatctgatgctgaccaacgtcggtggtgataattgcattgtcatcgacacaggcggcaacggcgttgatcaggccgtaatggcttaacggatcgcacgctttcgggattggacacggaaactcacgctgcaaatccgctaccaactggtgccactctgcacgcggttgcgcttccaccagcgggatcaactgcgccagcacgtcatcaacatccgcctgaatcgccacgtgcggctgcttgattttacccagctctgcacggtcgatatcgacatgaatgattttggcattcggacagaactgctcggttttgccaatcgcccggtcatcaaaacgcgcaccgagcactatcaacaaatccgcctcctgcaaaatatagttggtgctgcgcacgccgtgcatccccagcatacccaggctcaacggatgcgcttttggcaacatgcccagcgccattaaagtcatggtggtaggcagttgcgctttctccgccagttcacgcacccgtgcgggcgcattgatcacaccgccgcccagataaagcaccgggcgtttggcagcgttaatcatcgccgctgcgtcacgaatgctttcttcgctaaaggcgggggcggcggctttttctgccatagcgggctgtgtttcaatctcaaaaactgccgtttgcacatccttaggaatgtctatccacaccgggcctgggcggccactttgcgcaatgcggaaggcatcgctcatgacctgcgggagttcttcgatatgtctgaccagatagttgtgtttggtgatggggatagagatgccgtaggtgtccacttcctggaaggcgtcggtgccgatcatgctggcgggaacctgaccagtgatgcaaatcagcgggatggagtccagccgcgcatcggcaatggcggtcaccaggttagtcgcacccggtccgctacaggccatacagaccgccggtttaccgtcggtgcgcgccattccctgagcgataaagcccgcgccctgttcatgacgggccagaatatggcggatttgcgtgctttggcttaaggcatcgtaaacaggcaggatagaaccgcccggaatgcctgtcacaatcttaatgccctgctgttccaggaaatgaacgataaattctgcgccggtaaagcgcttacgcgtgcttgttgtgccgctacttgccatgctccagtccttttcttctgggccgactttccgggaggtgcttaaacgaaaaaccccgcccggtttgcgccggcggggttttggaatcgtgtgttgttccagtccttacggcgcattgccgacgaccaccaccacacgcacgacgaccactgcggcggatggcgcagttggtagtagttttgcgttgagcatggaagtagtcattggggaccttgttggttttgtgtttaacaatatttatacaagcacagctttacaggggagacaatggaaaatttttcagcaagggaaaattgaggggttgatcacgttttgtactgaattgcagataacaaaaaaccccgccggagcgaggtttcgtcagtcgcctgcggctggtaaccgcaaagcacactgtattatgtcaacactgaaagtatacgtgttccgcgcagaacgcgcaatttcggcacgaattttgacgtatttagtgcatagttgagtatcgatcacagtttgcgttttgtccaaatattactgtttatttatacagtaaacttctataatatcactgtacgcaatgtgttatgcgggggccgcatcgttacccggcgcactaagttctggctgaaacgggtggtgccgtcagcgccttaaccccgcgtgagcacactgtgttatgtcaacaagcacaacgtttctccttgagataccgcgtgcacaacagctggcaacaggcagcggaaaggtacgtcagctggcagtgctcctgaaccacaggagacgcgtatgaacctggtggatatcgccattcttatcctcaaactcattgttgcagcactgcaactgcttgatgctgttctgaaatacctgaagtaattcagattcaagtcgcaccaaaggggagcgggaaaccgctccccttttatatttagcgtgcgggttggtgtcggatgcgatgctgacgcatcttatccgccctaccatctctcccggcaacatttattgccgcttttgtttacatattctgccgctaaacaattccccattcctggcgtatatctggctaacattcatcaatgtgatagattcctctcccgcatttatgggaatgcgtagtgacttattctaattatttttataaaagcatccgtgataatgaaaaggcaaagaaacgtcaatttgttattgatgttggtattactcgtggccgtcggtcagatggcgcaaaccatttatattccagctattgccgatatggcgcgcgatctcaacgtccgtgaaggggcggtgcagagcgtaatgggcgcttatctgctgacttacggtgtcagtcagctgttttatggcccgatttccgaccgcgtgggccgccgaccggtgatcctcgtcggaatgtccatttttatgctggcaacgctggtcgcggtcacgacctccagtttgacggtgttgattgccgccagcgcgatgcaggggatgggcaccggcgttggcggcgtaatggcgcgtactttaccgcgagatttatatgaacggacacagttgcgccatgctaacagcctgttaaacatggggattctcgtcagtccgttgctcgcaccgctaatcggcggtctgctggatacgatgtggaactggcgcgcctgttatctctttttgttggttctttgtgctggtgtgaccttcagtatggcccgctggatgccggaaacgcgtccggtcgatgcaccgcgcacgcgcctgcttaccagttataaaacgcttttcggtaacagcggttttaactgttatttgctgatgctgattggcggtctggccgggattgccgcctttgaagcctgctccggcgtgctgatgggcgcggtgttagggctgagcagtatgacggtcagtattttgtttattctgccgattccggcagcgttttttggcgcatggtttgccggacgtcccaataaacgcttctccacgttaatgtggcagagcgttatctgctgcctgctggctggcttgctgatgtggatccccgactggtttggcgtgatgaatgtctggacgctgctcgttcccgccgcgctgttctttttcggtgccgggatgctgtttccgctggcgaccagcggcgcgatggagccgttccccttcctggcgggcacggctggcgcgctggtcggcggtctgcaaaacattggttccggcgtgctggcgagcctctctgcgatgttgccgcaaaccggtcagggcagcctggggttgttgatgaccttaatgggattgttgatcgtgctgtgctggctgccgctggcgacgcggatgagccatcaggggcagcccgtttaagcgcacgtcaccgcagcatcgtcatcagctccatgggagaacgatgctgctttatcagatcacgcatcacccgcatatgcggtgcggagtaagaataaaacgcctgatagcccgcacaaagcacgctgtctggcgtctcctgccgagcgtgcgggcacaggcgatgccagtcgcacgcctggcagtcacagcgcggttgcgggttttcgctgccacaccatttttgtaaggtggcgtcaaaaagctcaatgctgatacgactgatatctgcccgcacccaacactcgaacagggcaattaaaaatttcccccacagctctgctgtcacgctagcggccgtcagatcgccccggtcatcaaattcaagatagggaatgagctgtacggagcggatgccccgctgtttgaaattgtgataaaaatcggcaggttgcagagcatccttgtactctacaaccagtttatgcctgtcctcttcagcatcaatgacctgacttcctgtcatgcgactctctcaataaatacgataagttgatgtatatgcgttacagcaaacagtattgcgagagataacaccgcgagggagatcaaaaatttgtcacggactacgtgaaattgggaaaaatcgctattcgtgacatccattaaattgcgattacgggtgtagtgccagaggatcagcgccacgatggcgagaatgccaatgctaatccagaataacatgcccgcctggtgccagttgtgtttgatagccaacgccatcaacgcgccgtagcccagcatggtacgaaaccacgccagacttgtgcgctccggctgcagtcctgggtcggcaatgcgtctggctttgcggctatccggcatacaacaccagtcccataacgttaattatccggcatacaacaccagtcccataacgatcaccgccacgaccatcaatattaagctaatgattaataagctgttggtgtagggcaggtcctctttcagacgcatcgctttttcattgcgtaaccagcgcaagtagccatacatcgctaacccgccggaaaacagacacaacaacaacgccagcagttcgcgaatgacgggcgtggcgaaatctggcgcaagttgatcaagcccaacccccgccgccagaaatcctagtgcagtacggatccacgccagaaaagtacgctcattagccaggctgaagcggtaatcaggcgcttctccgaggcgggaaattttcattgttgctcctttgcaatttcactaacgctctacctttagcggtttttttaagaatttcgtccgcccgtttcctgatatgcttttgccatccgctacaaggaggtcagatgggtatcatagctcaaaataaaatcagtagtttgggcatgctgttcggtgccatcgctttaatgatggggattatccactttagtttcggccctttctccgcaccaccgccaacgtttgaaagcatcgtggcggacaaaacggctgaaattaaaagaggtcttctcgccggaataaaaggcgaaaaaattaccaccgtggagaaaaaagaggacgtagatgtcgataaaatcctcaatcaaagcggtatcgcactggccattgctgcgctactttgcgcatttattggcggtatgcgtaaggaaaatcgctggggcattcgcggcgcgctggtttttggcggcgggacgctggctttccataccttgctttttggtatcggcatcgtgtgcagcattttgctgatattccttatcttttccttcctgaccggcggtagtctggtttaagcagcctgaataatgcccgccgggtgatcatcagcgggcattatcgtcagaacttctgttttttctcctccaccttcaccccttgtgtcggtaggccggtgtcatagtcgcgtacaactgggctatagccatcttgtggacgtggacgaaacgcccccatccagcgcggccgtgcatctttacgccacggacgcagactccattggtaactgcggaacggatcgcgaattttgtccatgtaatccaataaggcgtcatgcattttgctgcgaacgtctgcaaaacggatatcatcgatcaggttatgcatttcatttgggtcattacggcgatcgtaaagttcatcactggtgaagaggttgagtaccagtttaaagtcatccgtcacccagcaacgcaccggaataaaaccgccaaagctgtcatgctcaatctcgtagcggttaaattccaccatcacgccgcgtggctctttcacggcaaggatattttcccccggcagaatctctggtttttcaatatctgccagcgccatcattgtcggcagtaaatcgatatgactgactggcgtatcgacctgtcgccgctccccttgcgggctacggatgatcagcggaatgcgggtgatgtcgtcatacatcgccgcccctttactgatcagcttatgtgcgcccatcatttcgccgtgatcggaggtataaataacccacgtattttcacgttgctctggcgttaaggcattgatgacccgtccgatttggtcatcaacaaagtcattacaggcaaaatagagcggatggtgataaagcccgtcatcaccgactgggcttggcatcgcctgcgcccataagcggtgatgttccggtttgttagccaggtcatcctgtgctttctcgcccagctcgtagtaaaaatcagcgtatttctctaaatactccaccggacaggtgaacgggtgatgcggctcatcatagctaaccaccatcaggaaaggctcgtctgcgcgcgcaggctgttgcagaaaatccaccgcccgattgctgatacgatgcgcccaggtgaaggtttcgtcgatatggttcgcctgtaaatcttcgacgctgtttaggccattgcgccacaggctaatctctttttccgtcagttcgctaagatagttcgccccatcgaaccagtaatcagcgtcccactccggcggacactcgccagtgccgaaatagtcatgaccgtcgagatgccatttgccgatgtaacaggtgtgatagccggcatccttaaagtagcgccccatagtggagatgtttttgcctggcgcgacgttgttggtccacgggccggactggttagcgtagataccggtaaatagtccggcccgtgcaggcgtacaaaccggactacaggtgtaggcggaattaaagcgaataccttccgccgccagactatcaatattttgcgtattcagcggtttaccgctatagcaaccgaccatattggtggcctgggtatcggtcatgacgaacagaaaattggggcgtttcataggctatccttcccgtcgggagtaaaggttacggctgggtcgtgacgatgccgccagctgtcaaaaatcaggtagacaatcactacggcggcaatgaaataactgatcatcgctaaccagcgcgtaccgtagccgccgaattcagccagcccggcatagacgccaatcatcgcgaacaggatgccaatactcgcgatcttgacgtttttccacggtttcatgtccaccgcaaacgcatctttgaaggtgaacggcgtggcgcgcggtttgataaaaccgatcaccagcatcacgaccacgttgatgcagaacgtacaggccagcacatagaggaaatggaagtcgaacttcaccagatagttgatggtgatgtagctgattatgccaatccccatcgctacttttgccgccagcgccgggatgcgcgggaagaaaaagcccataatgatgatggtaaccagcggcacgttgtaaatgccgttgagctgtttcatccagctatacagcccctgcggcgcgttggcgatccacggcgcgaccagcacgctaacgatagcgataaagaaaccaaatttgcgcccgacggtgaccagctgctgcggctcggcattctggttaatgatgcgacggtaaatacccatactgaataacgtactggcgctattcagaaagccgttgaaggtactgatcaccgcaccaaataacaccgcgccgaagaaacccaccattggcactggcagaacgttattgaccagcgtcgggtaggccatgtcggctttcggtaaatcctgatacagatgaaacgcaatcaaccctggcagcaccagtaccagcgggtcgagcattttcagcaccgccgttaacagcgcccccttttgcccttccgccaggcttttactcgccagcgtgcgttgcacgatgccctgatttgtacaccagtaaaaggtgttcaccagaatcaaaccggtaaatgccgcgccaatcggcaagggatcggtcgggccaccgatactgtttaatttctcggcgtgaacggtggtgagttgctcaatgccctgcataaagctgcccttgcccatcgcgattaggccaaataccggcaccatcaacccgccgataaccagcccaataccgttgatggagtccgccactgccattgcgcgcagtccgccgatcaccgcatacaaaattcccgccagaccaagcaaaattaccagtagccagatagccgcaccgtgagaaatctgtaggctttccccgacgtgaaacaggctgttgagcgccaacgcgccggagtagagaacaatcggcagaaagcagacgccggtggcaattaggaagcagaagtcgatgataatacgcgtcgttttatcataacgttcctccagaaaatcggggatggtggcaatgccgcgcttcagatagcgcggtaaaaagattagcgcgaggaagatcagcgtcaccgcactagtcacttcccagcccatcacgctcatgccgcttttgtaggcctgcccggaaaggccgaccagttgttccgtggaaaggttggttagcattaagctagcggcaataaccggcgcttttagactacgtccggcaagaaaatagccttgttggcttccggtatctgttttgcggaccttccaccaggtgatcaccgccaccagcagcgtaaaaccgacaaaactcaagatttgtaagctattcatctcatagcccttatttatgtttatgtcccggacgcatgaatatagggagaggtaaaatgcgtcgggtcaggcagtcagattcttaaaatacaaacgtcgtatccctgaacggattgttttctgttaagttcaggttgtgagcataattcgccggagggatattaaaatgaatggaaaattgcaaagtagtgatgtaaaaaacgaaactccgtacaatattcccttattgattaacgaaaatgtgatctccagcggaatttctctgatcagcctctggcatacctacgccgacgagcattaccgggtgatctggccgcgggacaagaagaaaccgcttatcgccaacagttgggttgcggtgtataccgtacaaggatgtgggaaaattcttttaaagaatggcgaacaaataacactgcatggcaactgtattatattcttaaagccaatggatattcactcttatcactgtgaaggtttagtctgggaacagtactggatggaatttacccccaccagtatgatggatattcccgttggtcagcaaagcgttatttataatggcgaaatttataatcaggaactcaccgaagttgctgagttaataactagtccagaagcaataaaaaataatctggcagtcgcttttctgacgaaaattatttatcagtggatttgtcttatgtacgcagatggtaaaaaagatccacaacggcggcaaattgaaaaattaattgccactttacatgccagtctgcaacaacgctggagcgtagctgatatggctgccacgatcccctgtagcgaagcctggttgcgtcgtctgtttttacgctataccggcaagacgccgaaagaatattacctcgatgcgcgtctggatctggcgctaagcctattaaagcaacaaggaaacagcgttggcgaagtcgctgatacgctcaacttcttcgactcctttcatttcagcaaagcctttaaacataaatttggttatgcgccgagtgccgtgctaaagaatacggaccagcacccaacggatgccagtccacacaattaacgtaactctggccagtacgctttgttggcctccagcaactcatccagaatagctttggcgacgctggcgctcggtaccgttttgctcaacgtaatcgcctgccacaggtgctgataactacgctgttcccaggcgtccacgaccagtttttccaccgccacttgctgactcattaaccctttctgaaactgcgggatatcgcgctccaccagtggttcaggccgtagtagcgcacgcgcatctgtttgcgatcttgcagcccaacaatttgcgccatccggctttcaataccgattggcatgtcacagatgttgaggattttcgcattcgggcgcagacgacgcgtggcttctgcgacaatggctgccgggttggagtagttgagcatccaggcatttggactatatttttccatataatccaccagttccaggacgccgccaatggaacgcatgccgtacgctattccgccgggtccgcaagtttcctgaccaacaacgccgtggcgcagcgggattttttcatccagttcgcgcatcgggtatttgccgacgcggatgtgcgccatgacaaaatcaacgtcgctgaatgccacttcaggatcggtggtgtaactaaacgcaatgtccggcgctttttctttaaggatgactttacaggcttcggcaatcacttcctgccgcgcaccatcgttatcataaaatttcagtgcacgaagcgggaaacggtcctgattcgccaggagcatcaacacgatgcctggcgtaaaggtgcttccaccgcctgcgacaaccacactgaatttggtcattatactgcctccgtaatggcaacattttctgcactttgatgagaattaattaagctatcgagctgttcacgcagctgagatacatgcagaccaatgatcacctgaatggcatcgccactacggaagacgccgtgcgctcccagctttttaaagacttcgtcatccagcgtttgactcatgtcatgcagtgcaatacgtaaacgcgtcgcgcaattgttaatgctggagatattgccgaccccgcccagggcttgcaggataccggcagcctgatccagctcttttttttggctctgccgcggtggtttggcctcggctggctttgtattcggctttactgtagagtttcacttccgcatcttcacgtcccggcgtgcacatgttgaactgcagaatcagtgtgcggaaaaccacgaagtacagcagggtaaagcacaacccaatggcgatttgggtcagcatcatatccgcgtggttgctgaacatcgggatccagttttgcggtaaaacttagtcaatcagacctccgcccatgttgcccaccacaccaaagagatacattacggtgctcatactggccgccagcacggcgtgtaccgcaaacagcaacggactaatgaacaggaaggtaaattccagcggttcggtaattcccaccagcatggcggttaaggttgcgggaatcagcaagcccgccacttttacccgattttccggtgcggcagtgaagtacatcgctaaagaaatgcccacggcaccaaagattttactgttaccgtgcagggcaaaaccgccttccgggaacaagcttttcagcggctcggcgctcaaactgaactcttgcagatgctgcgcccagtacatctgaatgccgccttcaacagctgccggaccaaagataaactgtccgtagatgaagtggtgtaaaccggttgggatcagaatacgttcgaggaaggtgtaaacccagaccccaagtgcacccgcgctacgcaggaacgcttgcagagattcaatccccatttgtacttttggccagccgagcaacgtcagccaggcacaggggatcatcaccaggaaggcgataatcaccacataagacgtcccctggaaaatgccgagaaaaaccggcagttttttatcgaacagacggttatgcagcgccgtcacaatgccggaaatgataattgcgccgataatgctggtatcgagggttttaatcccggccatcattgtcagaccgctacctgccaccgcgtcctgagtgaaatcgacgccgaagtagcttccccaggtcattcccatcgcgttgatgaaatagttccaggtcaggaaactcaccatcaccgccagacaagcacgcccctgcgcttgcttagcaaggccaatgggtaaaccgacagcaaaaatcagcggcatattacggaataccgtccaaccgccctcttcaataatgtgtacgatttgcgcgaataaactgttcggatcggtcagactttccccgacaaacatcgggttttgcagcaagatggcaagacccaccacaatcccggcgaagggaaacagcagcactggcgtgaacatcgcgccgccaaagcgttgaatttgactgagcatttccacatcctcttttctcaattctgtaagtaggaagcctgattggttatgcggcaggcctggagcgaggataggaagatgcgatcggcagaacatgacgacccaatgggattcgtgatcgctttcatgcttttcgttgggcggtagagatctacgttttcgcgaaaaagtagacctctgtgagcacaggtacacagcatcgaacacatctttaaaaaaaagatgttttttcaatcgattaagcagaacttgtgtgcgcattacccgggcttgcaggcaaaaaagagatctagagatgatctacaaaagcattgcggagcggttaagaattcgacttaactccgcagatttcacgctaaacagccttcttcccggtgaaaaaaagctggcggaagagtttgcggtaagccggatgaccatccgtaaagccattgacctgctggtagcgtgggggctggtggtccgccgccacggtagtggcacttacctggtgcgcaaagatgtactgcatcaaaccgccagtctgaccgggctggtggaggtgttaaaacggcagggaaaaacggtcaccagccaggtgctgatttttgaaatcatgcctgcgcctccggccattgccagccagttacggattcaaatcaacgagcagatctacttctcccgtcgcgttcgttttgtggaagggaaaccgctgatgctggaagacagctatatgccggtaaaactgttccgtaatcttagcctgcaacatctggaagggagcaagtttgaatatattgaacaagagtgcgggattttgattggcggtaattatgaaagcctgacgccagtgctcgccgatagactgctggcgcggcaaatgaaggtagcggaacacacgccactgctgcggatcaccagcttgagttatagcgagagcggggagtttttgaattatagtgtgatgttcagaaatgccagcgaataccaggtggagtaccatttacggcgactccacccggaaaagagttaaccgatactccagaagagcaccgccagtaattggggggtgataatgcgcaggaacattaccaacggatagacagtggcgtaagagagcgccgccgcaccgctggttggatgaagattattagcaaacgccagcgccggaggatcggtcatggaacctgccagcatcccgcacatggtcaggtaattcattttggctaacatccgcgccagaatgccaacagtaatcagcggaacggcggtgatcagggcaccataaccaatccagcttagcccttcgccattgaccagggtattcacaaaatccccaccagatttcagaccaacgacgctgaggaacagcacgatccccagctcccgcagcgcgaggttggcgcttggcggcataaaccagtacagcttgccgatactgccgatacgcccgaggatcaacgccataatcagcggtccgcccgccagccccagtttcaacgcggccgggaatcctggcacaaagacgggaatagaacctaacaatacgcctagcccgatgccaataaacactggcagcatctgaacctgttgcagtttttgctgcgcattccccagcacattggcaacggcatcaattgcggacggacgccccaccagattgaggatatcgccgaactgcaggctgatatcgccactggcgaccagttcgaccccggcacggttcaggcggctgataacaacgtcatagcgttctttaaagtgcaggtcgcgaatacgttttccgagcacgttttcattggtgaccaccacacgctcgacgcgcaaatcagtgcctttcgtggacaggctagtatcgacctcctgaccaatcaccagttgcgcattatgtaaatccgctggctgacccaccagatgcagcaaatcgcccagttggataatggtatctgggctaggaacttttagggtttcttcgcgtttcagacggctgcagataattttgtcgccgttgagaatcggtacatctttaatggctaaatcatgcaggttagggttctcaacgcgaatattgatagtcttgatcagcgcgccgccattggtgcgactagactcgtgctgctgagcttctgtctcgacattgacgcggaaaataacccgcaacatccacatggtgaacaaaatcccgcaaatgccgaatggatacgccatcgcgtaactcatccccatctgatcgaccatttccattggtgtacccaggtcgcgcaaaatctgctgccctgcccccagcgctggcgtattggtaaccgcaccggagaaaatccccagcactaccggcagtggaatatcaaacagtttatgcaggatggcggtaaccagaccaccgatgatgacgatcagaacagcaaacaggttgaggcgtaatccggagacgcgcaaactggcaaagaagcccggccctacctgaatcccgatagtataaacgaacaggatcaggccaaattcctgaataacatgcagcatatcgctacttaatgtcatccccgcctgagaaacaaaatggccgacgatgatcccaccaaacagcacgccgccaatacctaatcctatgccgcgaaatttgacgttgccgataaacaaaccgacgactgccaccaaagccagaatactgaccgttaatgctatatcactcatcgtccatttctcttgagataacattttaattgctacggattatggctgaatcggtgaagcagatttgccttatagcgcacattatcacgggaaagaacgtgccgaaatatcttaaacagtcgaaatttaacgcattgttgagtaagtaagacaaaaaaagccccaccagaatggcggggcaaagagaatagctagttagctatttaacgcgggacgttcgctgatagcgatacgctgcgctgcgatgggttcaggctcattacgaattaaatcaatatgcagtaaaccgtttacgaaggttgcgccagagacttccatattttcagccagcgtaaagctcaggctaaatggctgattcataagcccttgatgcagccattttttctcttcttttggctgctccggcgtgccttttacgctcaggcgcgtaccttccagttgaatctctaaatcttcctgacggaaacctgccagcgcaagggtaatgcggtagtggttatcgtcgcttttctcaatgttgtacggcgggaagctctggctttcaccggcgttttgcagtgcgttggccagtttgtcaaaaccgatccattgacgcatcagtggggataaatcgaagttacgcatagtcatttctccttctaagaagcgagtaagtacctgcaaatccgaagattcgcatatgctccctgacggcgagcatggagatgtcaggccgcgccaggcggccttagggaattagttgatttcgatacggcgcggttttttcgcttccggaatcacgcgttcgagatcgatatacagcaaaccatttaccaggttagcaccacgaacatgaatgttctcagctaactggaatttgcgttcaaagttgcgttcagcgatgccctggtacagataggtgcgctctttttgttcgtcggcgtgagcacctttcaccaccagcagattatcctgggcggtaatttccagttcgctctcagcaaaaccagccacagcgatagcaatgcggtaatggttttcgtctaccagttcaacgttatacggagggtagccgccattactctggctctggttgttttctaagtggttaaacaaacggtcaaatccaatagcagaacggtaaagcggggataaatcaaagttacgcataatcaatagctcctgaaatcagcgagaatgtaagaccttccacaatggacaggtcaggtagccagaacacccatcaggcgcgtcctcatcggctacgatgtaaaaatgggtctggaaatgaacttttcaagccttatcagcggacttttttttgcagtttatggtctattgcatagactgagggggcagcacgaaacgttaaagtgcgatagccgccacagtgcgacgtaatgatgatgttattttcagcaagggatcgctataactcatcaggccaacacccacgatcaacagatgaatttattatgataagaaatgtgttgttagcgttcatgatatgcagcggaatgacattactcggaggatgctccagcgtgatgtcccataccggagggaaagaaggaacgtatcccggcacccgcgccagcgcaaccatgattggcgacgatgaaaccaactggggcactaagagcctggcgattctcgatatgccgtttaccgctgtgatggacacgcttttactgccgtgggatgtgttccgcaaagacagcagcgtgcgcagccgcgttgaaaaaagcgaagccaacgcgcaagccaccaatgcggttattccaccggccagaatgcctgataactgatttagcgatcagtttcggtgatccacagctggccgccttccatccacgccagccactgaccatccgggctgaagaccacggcgtccgcagaaggactattggcgtggtgttcggttaaatactcaacctcgccgctttgcgcatgggcacaagcaattcgattatccagcacaaagcccaaccattctccactcggatgccagttaaatgcagactgaatatccgttttgttatgggttaactggcgcggctcgccgccctgtgggctgataagccacagttgcacaatgccgttatcatctcgcattaaaaacgcgatttgtgtaccctgcggattacagcgcacccagtggcgcgggacgttgactaaccccggataagcccgatggtgggtaaaggttaaacgtcgctgcacgacgccacgcggtggcgcgggcagggttgtttccgttccgcttaacggcgcatcacctgccgctttccagccagcttcatcttgcggtaactcaacgataaacagctccggcactttctcgccctttgggctaagtgtgtcgccaataaatgccagcgcgtgatttcctacccatccttcttcataagcacgattgatttcatcactgccaggctgtggcgtgggcgtggttttgctcaccagcacgcaccagtggctaccgctgtattcacgcggatgctgcttttgtacgttgaccgggccaaacggcgcagcaacaccgacgtttcgcaaatccagcgccggatcgagttcatgcattacatggtcgttataggtaaagctcaccctttcaccgttcgggctaaagacatgcacatggctgccgccgcgcagcactcctggcgtatacggcgcggtaatatccatcgcatcaaggttactcatcttgccgccttcaacaatcactccgcgccgatgatggaagtcgtaatgccatgtttcatcaggattttccgggccgtggatgaaaacatatttctcactcttcggatgaacggtcaccacgccgacgtgtgcgccctgactcgcgcgatagataacctcgacctcgccggtatggatattcacacgctcaatggtctcgccggtaaagctcgcgccagaaggacgcacgtcaaataccagccactggctgtcgggcgtccaggtattggtattggtgagcaggtgattacggggagcaaaggttatctgtttcatggcgcggtcctgatacaaaacgggtcccgccatcatacttcacaaggacttcactttcagacaatagtcttttgccatcgtgatgaatgtgagtgaaaagatggaacatttcgacgtggcgattattggcctcggcccggcaggaagcgcgttggcacgaaagttagcaggcaaaatgcaggtgatcgcgctggataaaaagcaccagtgtggtactgaaggtttcagcaaaccctgcggcggtctgctggcaccggacgcgcagcgatcttttattcgcgatgggctgacgcttcctgtcgatgtgatcgctaatccgcagattttcagcgtcaaaaccgtcgacgtcgccgcaagcctcacgcgtaactaccagcgaagctatatcaatattaatcgccatgctttcgacttgtggatgaaaagcctgatccccgccagcgttgaggtttatcacgacagcctgtgccgaaaaatctggcgtgaggatgataaatggcatgtcatttttcgtgcagacggctgggagcaacatattaccgcccgctatctggtcggtgccgatggcgcaaacagcatggtgcggcgacatctctacccggatcatcaaatccgtaaatatgtcgctatccagcagtggttcgcggagaaacatccggtgccgttctactcctgcatctttgataatagcataactaactgttatagttggagtatcagcaaagacggttattttatctttggcggtgcctatccaatgaaagacggtcagacgcgtttcacgacgctgaaagagaaaatgagcgcctttcagttccagtttggtaagacggtgaaaagcgaaaaatgcacggtgctgtttcccagccgctggcaggattttgtctgcggtaaggacaacgcctttctgattggtgaagcggcgggatttatcagcgccagcagcctggaggggattagctatgcgctggatagcacagacattctgcgtagcgtgttactgaagcagccagagaagctcaataccgcttactggcgcgccacccgcaaactgcgtttaaaactcttcggcaagatagtaaaaagccgatgcctgaccgcaccggctttaagaaagtggattatgcgcagtggtgtggcacatattccacagttgaaggattaaccaacgcgcttcacatcgcccaccagcaggatataagagagcgcgccaatcaacgcgacggcggagatataaaccagtgcaggtgcgaaaccgtaaccctgcgccaggtaccccaccaccagcggaacggtgatgccgcccagaccaccggcgaagttaaacacgccgccggttaaaccaatcaggcgcatcggtgccagagaagaaaccaggctccaggtaatgctagcaaaaccgttaccgaagaatgccagcgccatcaggcacataatcatcatcggatcgttagtgtagttagcgcccataatgcaggtggagatcagcaagccgcagataatcggcgttttacgcgcaaagcccagactaaagcccttacgtaccagcagatccgctacccagccagagagcaggacgccgacaaacgccgcgaggaatggcaccgtggtcataaagcctgctttcagcgccgtgattcctttttcctgggttaaatagttcgggaaccaggttaagaaaaaccacagtgtagaagccaccgcaaattgcccaagataaacgccgatcagtttacgatggaacaccagtttccagtctttggctgttaacggctgacgcgcctctttcttcaccggcgcatcaccatccaccagaccgccgccatcacgaatgtaatccagttcagctttgctgatacctttggtcaggcgcggcggctgataaaccttaaaccaaatcaggctccagataatgccgataccaccagtgacaatgaacacccagtgccagctcaacatctcctgaatccagatcagcagcggcgtcagaaacgccagaccgacaaactgaccagacgtataaaaaccaacggcagaagcgcgttcatgttccgggaaccagctggtcaccatccggttattggtcgggaaagcaggcgcttcgaaaataccggttatcgcgcgcagaccaattaaactcattaagcccgtggcaaagccctggaataaagtcgccacactccagccaaatatcgcaataaaataagtcacgcgagaacctacgcgatctaaaaaccaaccgccggggatctgacatagcgtataaagccaggcgaaggcgctaaatacatagcccatttccgctttggtaatgccgaactcttcctgaatatgggcggaagccacggccaggttggcgcggtcgacataacaaatgactaccgtaataaagatcatcaccagcgtcagataacgccgacgccccggctttgctgcattaacgggaatatccatagcgagctttctccagattttgggcatagcgaagccgctcaccatgccctgtaatttacagagggttatatttttgtattgctgttttagtgcccgatgaggggcttacgtggcaggaattaccactctgctacgctgttatcttcatgacgccagagcggattacgccagtccggggcatttttactgaactcaatcactttagcttcgtcgatttccacgcctaagcccggtttcgttaacggtttaaagaagccgccgaccatgctgaagtcttctttgtttttcacaaagtcgagtaactccgcgcctttgttgtaatgaattcccatactttgttcctgaagtacggcgttataggaaacaaagtcgatatgcaggcaagccgccagtgcaatcggtccgagcggacagtgcggcgcaagggtcacgtcataggcttctgccattccggcgattttgtagcattcggtaataccgcccgcgtgggagagatccggttgcagaatgctaataccacctgcctccagcacgcgtttaaaatcgaagcgactgaacatgcgttcacccgccgccagtggaatatgcgtttgtgccgccagtttcgggtagtattcggcttgttccgccagcaccggctcctcaataaacagcgggcgatacggctccagttctttaatcagcactttcgccatcggcgcgctgacgcgaccgtggaaatcaagaccaaactcaatctgattgccaaaagcttcacgaatttgtgccacggtgttaaccgccgcatctaccgcgcgggagttatcaattagccccagttcttcacaaccgttcagtttgaaggtatcgaagccgatttcgcgtagcgttttaatgccgtcgataacatccgccggacgatcgccgccaacccaactgtaggctttaattttgtcgcgaaccaggccgcccatcagttgccagaccggcgcattcagcactttacctttgatatcccataacgcctggtcaatcccggcgatggcgctcatcaggatcggaccgccgcgatagaatccggcgcgatacatcacttgccataagtcattgatgcggcttggatcctgaccaatcaaatagtcacccagctcgtgaactgccgcttccaccgtacgggcgcggccttcgatcacgggctcgccccaaccgaccacgccttcatcggtttcaattttcaggaacatccagcggggaggtaaacgatacgtggtaattttggtgattttcattgcactgcctctcgatacgccttaacaaatgctgctgcctgctgcgcggtgcgctctacggattgcccggcgcgatagagatcgctgcctaagcccgcccctgcacaacctgcgtctatccactgcgccaggttttctggcgtcacgccgccaacggcaaagactgcgatgtcgcttggcaataccgcttttaacgctttgatgtattgcggaccaaaagcgctactcggaaatattttcagcgcctgcgcgcccgcttcgagcgcggtaaaggcttcggtcgccgtcgcgcagccggggcagacggtcatgccgtagcccaccgcacggcggatcacttcactatggatattgggcgtaacgatgagctgacagcccatcctggcgagcgcatcgacctgttcaggtttcagtaccgtacctgcgccaatcaacgccttgtcgccgtacgcatcaacgatggcgggaatgctttgctcccattgtggggaattcagcgggatttcaaccgcgtcgaacccggcgtcaatcaccgcgccaacatgcgccagcgcctcgtcgggcgtaataccgcgcaaaatggcgatcagcgggagtttagtttgccactgcatgagcgatgctccttataccagcctgaaatgccgtgtcgcccgccaccgccgtcacgtcgcaacccatcgcctgaaaggcttgctggtagcgcgcggtcaggcttgttccggcgacaagggtgatggcgtgttgatgggccacatagtcgcgcatactggcgacctctgcgccaatcaacaaaccagagagaaattcgctgacctgttcgcggggaagtgttcccagcacatggctggcgcgaacttcaaaaagctgcggcaatatggcgggcgtattaagaccacgctcaaggccagctgtgaaggcatcggcagagttttcctgcggcggcaaacctgcgccaatcaaactgtgatttaacagtaaatgatgtaattcaccggtcatcacggtgcgaaaatcgttgatttgctggctatcggcctgcacccatttgcaatgggttccgggcatgacataaagagaggaaggagccagagctcgcgcgccgatcaattgtgtttcttcgccgcgcatcacattgtggttatcgtcatgagagacacataatccgggaataatccagatattgtcgccaacactcgttaattgttcgccaatagagctaaaacaggcaggaacagataaatacggtgcaactttccagccgacgttgctgccaaccattcctgccattaccactggcgttttctcttcacgccagtcggtcgtgacttctgctaacaccgcagccggagattttccgttcaggcgcgtgacgcctgcttcactttgcctgctctccaggcagtggtcgccctgataaagccaggcgcgcagattggtgcttccccagtcaattgcgatgtagcgagctgtcatgtgatttcctttaaccttcgtgtgctgctggcgatcatggtaagcgccgcctgctctgccgcatcgccgtcctgatgtcgtatcgcatcgaacagcgccttatgttcctggagcgtttgcggcatgttggcctcatcgcccatccaggttcgttcaaaaaccgcccgctgcaggctactgatcgcaatgctaagttgctgtaacaccgggttatgcacgctctgcagcaccgcctcgtggtagcgaatatccgcttcgttaaacgcttcgcggtcctgattgttggcaatcatctcgttcagcgcgctttcaatctgcgccagatcgctggaagtcgcgcgctctgctgcccaacgggcaatcgccggttccaccagatttcgcacttcgctcatggcactgataagccgtgggtcgtagtcattttccagcacccattgcagtacgtcagtgtcgaggtaattccactggttacgcggtgccacaaacgccccgcgataacgtttcatttcaatcagccgcttcgccatcaggctacggaacacctcacggatgatgttgcggctggttgcaaactcctcacagagttccgcctcagccggaagcgggctgcctggcacgtatttgccgtgaacgatctgtttacccagcgtaatgacaatgcgatcggttttattgagagtcatggagagtccttgtgctctgtatgttcttctctactttaccccgatcgatgcataacgcggcaactttgtagtaccagcgtgatgacgttcgcgtttgccgtgcgtgtaatgtagtacaaacttatattgttgtactacaatttagatcacaaaaagaacaatgcataaaaaaatgacatgcgtcgggcagaaatctgaaaagggatatcaggcgctaaacaggagggaaagaagagtatgctttcaacggcttagctactcgtttaaaggattaatcatgaagttgaattttaagggattttttaaggctgccggtttattcccactggcgctgatgcttagtggctgtatcagctatgctctggtttcccataccgcaaagggtagtagtggaaagtatcaaagccagagtgacaccatcactgggctaagccaggcaaaagatagtaatggaacaaaaggctatgtttttgtaggggaaagcctggattaccttatcactgatggtgccgatgacatcgttaagatgctcaatgatccagcacttaaccggcacaatattcaggttgccgatgacgcaagatttgttttaaatgcggggaaaaagaaatttaccggcacaataagcctttactactactggaataacgaagaagaaaaggcactggcaacgcattatggttttgcctgtggtgttcaacactgtaccaggagtctggaaaacctaaaaggcacaatccatgagaaaaataaaaacatggattacagtaaggtgatggcgttctaccatccatttaaagtgcgattttatgaatactatagtcccagaggcattccggatggtgtttccgcagcattactgccagtgactgttacgctggacatcattactgcaccgctgcaatttctggttgtatatgcagtaaaccaataatcagtaagcgggcaaacgcgtttatgctgtttgcccgcccacagattaattcagcacatacttctcaatagcaaacgccacgccatcttcaaggttagatttggtgacaaagttcgccacttctttcacactaggaatagcgttatccatcgccacaccgacgcctgcatattcaatcattgcgatatcgttttcctgatcgccaatcgccatgatttcttccggtttaatacctaacacgtcggccagacttttcacccccgtacctttgttaacgcgtttatcgaggatttcgaggaagtacggcgcacttttcagcacggtatatttctctttcacttcctgcggaatacgcgcgatagcctggtcgaggatggcgggttcatcaatcatcatcactttcaggaactgggtattggggtccattttctccgcttcgcagaacaccagcggaatggtggcaacgaaggattcatgcaccgtgtagtagctgatatcacggttggcggtgtacagcgtggtgcggtccagggcgtggaaatgagaaccgacttcgcgagagagtttttccaggaaacgatagtcgtcatagctgagagcagtttgcgccacggtgctaccatcagcggccttctgtaccagcgcgccgttataagtaatgcagtagtcgcccggctgttccatatgcagctctttcaggtagttgtgcacacctgcatacgggcgacccgtcgttagcacgacattcacgccacgggcgcgagctgcggcaatcgcatttttaacggcgggactaatggtgtgatcgggcagcagaagggtgccatccatatcgatagcaatgagtttaatagccatgagttccccaggtagattggttcctgacccatgctaacgcgattccgctcaaaaatcagtacaacacccgagggaaaagggggatgcaacgcgcgttgcgtgctccctttttgcttagcggaagagtttccctttcagcagttccatgcctgcggaaagcagatcgttattggcttgtggactcacttcaccttgcggactgagcgcatcaataatcttcggcaattgttctgccagtaaactggaagctgtactggtatccacgccaagtttttgcccgagatcggacaccgcatttgtgccgagcgcgctttccagttgctcgccactaacgctttgattgccctgttgattactcagccaggtactgagaatggcccctaagccgccactttgcagtttttccagcagcacctgaatgccgccctgctcctcaacccaacttaaaatagcctgatatttccccgcatcgcctttcagaaaggcaccgacaacttcatcaaaaagccccatgataatcacctgtaaagcgttacgtgttgacccaaaaagtatagatttgcgggatgataattgcggattgcagaaataaaaagggcggagatgatctccgcccttttcttatagcttcttgccggatgcggcgtgaacgccttatccggcctacaaaatcatgaaaattcaatacattgcaagattttcgtaggcctgataagcgtagcgcatcaggcacgctcgcatggttagcgccattaaatatcgatattcgccgctttcagggcgttctcttcaataaacgcacggcgcggttcaacggcgtcgcccatcagcgtggtgaacaactggtcggcagcaatcgcatctttaacggtaacgcgcagcatacgacgactttccgggtccatagtggtttcccacagctgttccgggttcatctcgcccagacctttataacgctggatggagaggccgcgacgggactctttcaccagccagtccagcgcctgctcgaagctggctaccggctgacgacgctcgccacgttcgataaacgcatcttcttccagcaagccacgcagtttctcacccagcgtgcagatacgacgatattcgccaccggtgataaactcgtgatccagcggatagtcagtatccacaccgtgggtacgcacgcgaacaatcggctcgaacaggttttgctcagcattggtgtgaacatcaaacttccactggctgccgtgctgttctttgtcgttcagttcgctgaccagcgcgttcacccagcgggtaacggtctgctcatcagaaaggtcagcttccgtcaacgtcggctgatagataagctctttcagcattgctttcggataacgacgctccatacgattgatcattttctgcgtcgcgttgtactcagataccagtttctctaacgcttcgccagccaatgccggtgcactggcgttggtgtgcagcgttgcgccgtccagcgcgatagagatctggtactgatccatcgcttcgtcgtctttaatgtactgttcctgcttgcctttcttcactttgtacagcggcggctgagcgatgtagacgtgaccgcgttcaacgatttccggcatctgacgatagaagaaggtcaacagcagcgtacgaatgtggctgccgtcgacgtccgcatcggtcatgatgatgatgctgtgataacgcagtttgtccgggttgtactcgtcacgaccgataccacagccaagcgcggtgataagcgtcgccacttcctgagaagagagcatcttatcgaagcgcgctttctcgacgttgaggattttacccttcagcggcagaatcgcctggttcttgcggttacgcccctgcttcgcagagccgcccgcggagtccccttccaccaggtacagttcggaaagcgccggatcgcgttcctggcagtctgccagtttgcccggcaggcccgctaagtcgagcgcacctttacggcgggtcatttcacgcgcgcgacgcgccgcttcacgggcacgggcagcatcgataattttgccaaccacgattttcgcgtcggttgggttttccagcaggtattctgccagcagttcgttcatctgctgttcaaccgcgcttttcacctcagaagaaaccagtttgtctttggtctgggaggagaatttcgggtccggcactttcacggaaacgaccgcaatcaggccttcacgcgcatcgtcaccggtggcgctgactttggcttttttgctgtagccttctttgtccatgtaggcgttcagggtacgggtcatcgccgcacggaagcctgccaggtgagtaccgccgtcacgctgcggaatgttgttggtaaagcagtagatgttttcctggaagccatcgttccactgcaacgccacttcgacgccaataccgtctttttcagtggagaagtagaagatattcgggtggatcggcgttttgttcttgttcagatattcaacgaacgccttgatgccgccttcatagtggaagtggtcttctttgccgtcgcgcttgtcgcgcagacgaatggaaacgccggagttgaggaagctcaactcacgcagacgtttcgccagaatttcatattcgaactcggtcacattggtgaaggtttcgaggctgggccagaaacgcaccatggtgccggttttttcagtctcgccggtaaccgccagcggggcctgcggtacaccgtgttcgtagatctgacggtgaattttaccctcgcgctggataaccagctccagtttttggctcagggcgtttactacgctaacaccaacgccgtgcagaccgccggacactttataggagttatcgtcaaatttaccgcctgcgtgcagaacggtcatgatcacttccgccgcgcttacgccctcttccgggtgaataccggtcggaatgccgcgcccgtcatcctgtacagagacagagttatcggcgtgaatggtgacgataatttctttacagtgacccgcgagcgcttcgtcgatagcgttatctaccacctcgaataccatgtggtgcagaccggtgccgtcatccgtgtcgccgatatacatacccgggcgcttacgcaccgcatccagccctttcaggactttgatactggaggagtcataagaattgctcatcaacgtttctcgctcatttatacttgggttaatccgttattttacccttttccacggtaaacatcttgctattttcgtcgctcatgtctataacgtgttcagcactgatcgcgctgacaaagacctgactttgcgtcgcttttaagcggctggcaagcagcccgcgacgctcatcatcaagctcagaggcaaaatcatctatcaggtagagacaccgccgcccgctttcacgggtgaggaactctccttgcgccagacgtaaggcgcacatcaacagcttaagctgcccacggcttaaggtatcttccaccggcgcaccgtcggcgcgaatgcgtaagtccgctttgtgcgggccgtgcgcggtgtaggttagctggcgatcgcgttcaaaattacgttccagcacctcagcatattctgtctctttctcccagccgcgctggaaagagaaagtcagagaaaactcagggagaaattgcttacaggtatcagccatatcggccgcgataccggcgctatactccgcgcgccaggtgctgatttgctccgccagcgggatcagctctttatcccacgggcgtagctgttcgtaacgtgtcacctggcgcagcgccgcattgcgctgcttgagcaatcgcttgagattgctccaggcggtgaaaaatccgggttcgttgtgaaagcatccccagtcgaggaatgctcttctgtatttggggccgccgttgagtaaagtaaacccttctggcgttatcaactgcattggcatcaggtgcgccagttccgcgaccttatgcccgtctgtaccgtcgatgcggactttgctgtcgccctgtttgtctttggttaagccaatcgctgtctcgcgctcttcgccctgtaatcgcccgtggagaacaaacgcctcctgctcatggcgaatgacgcgaccaatctgcaaactgcgaaacgcccgaccatggccgagcgtatagatggcttccagcacgctggttttgccactgccgttggcacctaccagaaagttaaagccgggagataaggcgagatccgcggtttcaatgttgcggaaatcgcggatcaacaagcgggtgagggacattacagtctcattggcatgacaacataagccgcgctctggctggccgcatcttcaatctgcacgctggaaacgctatcggtcagcatcatgcggacgttttcgcatttcagcgcgttcagaacatccagcacataactgacgttgaagccgatttccatctccgcaccgctataggtaacgtcgaggatctcttccgcttcttcctgttccgggttgttggcggtgattttcagctggttttcgctgacataaagacgtacgccgcggaatttctcgttagagagaatcgccgcgcgagcaaacgcctgcttgagcagatcgcagccagcttccagatgtttgtccgggttcttcggcagaacgcggcgataatccgggaagcgaccatccaccagtttggaggtgaagataaagtcgccaacgtgggcgcgaatgttgttgctgccaatctgtacgcgcagcggattgtcgccgccgtcgagcatacgcatcagttcaatcacgcctttacgcggtacgatcacgctatggcttggcaaagattgaccaattggcatactacagaccgccagacggtggccgtcggttgccacggtgcgcagttcttcaccttcggtttcaaacagcataccatttaagtaatagcgaacgtcctgatgcgccatagaaaactgggtcgcttcaatcagacgcttcatcgttgcctgcggcagggtaaattcgacttcactctgccagtcatcgaggttcgggaaatccgccgctggcagggtagacaggctaaaacggctacgcccggagcgtaccagcatccgttcaccttccagctgcacggcaatttccgcgccttcaggcagaccacggcagatatcaaagaatttgcgcgccggaacggtcgtcgctcctggctcgtgtggctgaaccagcgcaacacgtgccaccatttccatctcgagatcagtaccggtcaggctcaacgtaccgtcagcaacctgtaacagcagattaccgagaatcggtagcgtaggacgaccacctaacggaccgctcacctgttgtagcggttttaataaatgctcacgttctacggtaaatttcataggtttagctactcaatgttctgattaaattactaaaatcttctttgatatcgtggctctcttcacgcaactgctcgatcttacggcaggcatgaagcaccgtcgtgtggtcacggccaccaaacgcatcgccaatctccggcagactgtggttagtcagctctttcgccagcgccatcgccatctggcgcggacgcgccacgctgcgggatcgacgcttggaaaggagatccgcgactttgatcttgtagtactccgccaccgtcttctgaatattgtcgatggtgaccagtttttcctgcaatgccagcaagtcgcgcagcgcctcacgcacgaagtcgatggtgatcgcccgtccggtaaagttggcattggcaatgacgcggttcagcgccccttccagctcacgtacgttagatcgtagacgcttggcgataaagaacgccacttcgcccggcaaacgaatgtcgttttcgtcggcctttttcatcaggatcgccacacgggtttccagctctggcggttcgatcgccacagtcagtccccaaccgaagcgggatttcaaacgatcctcaacgccgttgatctctttcggatagcgatcgctggtgagaatgatctgttgattaccttccagcagggcgttgaaggtgtggaaaaactcttcctgagatcgttctttattagcaaaaaactgaatatcgtcgatcagcagtgcatctacggaacggtagtagcgtttaaactcttcgatcgcgttgttttgcagggctttaaccatgtcctgaacaaagcgctcggagtgcatataaaccactttggcattcggcttgcgcgccataatgccgttacccaccgcatgcagcaggtgagttttacccagacccgtgccgccataaaggaacaacgggttataggcaccgccagggttatccgccacctggcgagccgccgcgcgcgccagttggttagatttaccttcaacgaagttatcaaacgtgtgtttgacgtttacgttagaacgataggtcggttctgccggggccgggacgttatcccaaccactgcgcgtagaaggcgcagcacgttgcggctgcgtttgcgccacctgtgcaggggccgcgacgttgctcgtcactgccgcttgtggcgtttgcgtcaccggtttggtgccgacttcaaaacgcagctgtggggcatccgctccgcagaaactggttagcagtccattgatattattaaggtacttgtcccgtacccaatcgaggacaaaacggtttggcgcgtacagggccagcgtgttatcgctcagttccgcctgcaatgggcgtatccacatactgaattctgtggctggtaactcatcctgcaatcgggcaagacactgctgccaaaggctaagactcacggcggactccactcgaacaaaagtcgataatgactaaggctgaaacattcatgattgttgacgtacgtcgaaaagaccctgcttgagggtgacgcacgaaccgctgtctgcggttatatgcccgatcaagatcctgcaaaacgatcgggaccgcggatcatagcctaaactgcgcaagagatcttctgtttctcacagattttcccgatttatccacaggactttccagaactcgctaagtgtaaacgatcctgccgcgaggcgggcacgatttacgccgcatattggaaaatttaatgaccatagacaaaaattggcttaatcgatctaataaagatccaggacgatccttgcgctttacccatcagcccgtataatcctccacccggcgcgccatgctggtttccactggtgtgaggtcgtacattttccctgcgaaaaggtgcggaaaagcgcggtaaataaggaaagagaattgactccggagtgtacaattattacaatccggcctctttaatcacccatggcttcggtgtccatcgtttcatttttcggcggatatccaataaagccattgaatttattcaagtttaggtagaaatcgccatgaaacgcacttttcaaccgtctgtactgaagcgcaaccgttctcacggcttccgtgctcgtatggctactaaaaatggtcgtcaggttctggcacgtcgtcgtgctaaaggccgcgctcgtctgaccgtttctaagtaataaagctaacccctgagtggttaagctcgcatttcccagggagttacgcttgttaactcccagtcaattcacattcgtcttccagcagccacaacgggctggcacgccgcaaattaccattctcggccgcctgaatagcctggggcatccccgtatcggtcttacagtcgccaagaaaaacgttcgacgcgcccatgaacgcaatcggattaaacgtctgacgcgtgaaagcttccgtctgcgccaacatgaactcccggctatggatttcgtggtggtggcgaaaaaaggggttgccgacctcgataaccgtgctctcagcgaagcgttggaaaaattatggcgccgccactgtcgcctggctcgcgggtcctgacttaatcggaagcgttggaaaaattatggcgccgccactgagccctggcagccgggtcctgatagccctcattcgggtctatcaacgcctgattagtccgctactcgggccgcattgtcgtttcactccaacctgtagtagctacggaattgaggcattgcgcaggtttggagtgataaaaggcagttggttgacggtgaaacgcgtattaaaatgccaccctttacaccctggtggtgacgatcccgtcccgcccggaccatttgataccagagaacactaacgatggatagccaacgcaatcttttagtcatcgctttgctgttcgtgtctttcatgatctggcaagcctgggagcaggataaaaacccgcaacctcaggcccaacagaccacgcagacaacgaccaccgcagcgggtagcgccgccgaccagggcgtaccggccagtggccaggggaaactgatcagcgttaagaccgacgtgcttgatctgaccatcaacacccgtggtggtgatgttgagcaagctctgctgcctgcttacccgaaagagctgaactctacccagccgttccagctgttggaaactagtccgcagtttatttatcaggcacagagcggtctgaccggtcgtgatggcccggataacccggctaacggcccgcgtccgctgtataacgttgaaaaagacgcttatgtgctggctgaaggtcaaaacgaactgcaggtgccgatgacgtataccgacgcggcaggcaacacgtttaccaaaacgtttgtcctgaaacgtggtgattacgctgtcaacgtcaactacaacgtgcagaacgctggcgagaaaccgctggaaatctccagctttggtcagttgaagcaatccatcactctgccaccgcatctcgataccggaagcagcaacttcgcactgcacaccttccgtggcgcggcgtactccacgcctgacgagaagtatgagaaatacaagttcgataccattgccgataacgaaaacctgaacatctctagcaaaggtggttgggtggcgatgctgcaacagtatttcgcgacggcgtggatcccgcataacgacggtaccaacaacttctataccgctaatctgggtaacggcatcgccgctatcggctataaatctcagccggtactggttcagcctggtcagactggcgcgatgaacagcaccctgtgggttggcccggaaatccaggacaaaatggcagctgttgctccgcacctggatctgaccgttgattacggttggttgtggttcatctctcagccgctgttcaaactgctgaaatggatccatagctttgtgggtaactggggcttctccattatcatcatcacctttatcgttcgtggcatcatgtacccgctgaccaaagcgcagtacacctccatggcgaagatgcgtatgttgcagccgaagattcaggcaatgcgtgagcgtctgggcgatgacaaacagcgtatcagccaggaaatgatggcgctgtacaaagctgagaaggttaacccgctgggcggctgcttcccgctgctgatccagatgccaatcttcctggcgttgtactacatgctgatgggttccgttgaactgcgtcaggcaccgtttgcactgtggatccacgacctgagcgcacaggacccgtactacatcctgccgatcctgatgggcgtaacgatgttcttcattcagaagatgagcccgaccacagtgaccgacccgatgcagcagaagatcatgacctttatgccggtcatcttcaccgtgttcttcctgtggttcccgagtggtctggtgctgtactatatcgtcagcaacctggtaaccattattcagcagcagctgatttaccgtggtctggaaaaacgtggcctgcatagccgcgagaagaaaaaatcctgattcggtgagttttcgctaaaataagggcggtcagttgaccgccttttttcttttcgtagggcggataagcaccgcgcatccgccacacaaagcaacaggaacatcatgagcgataatgacactatcgtagcccaggccacgcctccgggacgtggcggcgttggcatcctgcgcatctccggcttcaaagcccgtgaagttgccgaaaccgtgctgggtaaactgcctaagccgcgctacgccgattatcttccgtttaaagacgccgacggcagcgtgctcgatcaggggattgcgctatggttccctggcccgaacagcttcaccggcgaagatgtgctggaactgcaaggtcatggcggtccggtgatcctcgacctgctgttaaaacgcattctgaccattcccggcctgcggattgctcgccctggtgagttttccgaacgcgcgtttcttaacgataaacttgacttagcccaggccgaggcgattgccgatcttatcgacgccagtagcgaacaggcggcccgtagcgcacttaacagcctgcaaggcgcattctccgcacgggttaatcatctggtagaagccctcacccacttgcgcatttacgtcgaagcggcaattgatttccccgatgaagagatcgatttcctctccgacggaaaaattgaagcccagctcaatgacgttattgccgatcttgatgcagtgcgtgctgaagcacgtcagggtagtttgttgcgcgaagggatgaaagtggtgattgccggacgtcctaacgccggtaaaagcagcctgttaaacgcgctggcggggcgtgaagcggcaatcgtaaccgatatcgccggaactacgcgtgacgtgctgcgtgagcatatccacattgacggaatgccgctgcatatcatcgataccgccgggctacgtgaagccagtgacgaagtagaacgtattggtatcgagcgcgcgtggcaggaaattgaacaggccgaccgcgtgctgtttatggtcgatggcaccacaacagacgccgtggatccggcagagatctggccggaatttattgcccgtctgccagcgaaactgccgatcaccgtggtgcgcaataaagccgatatcaccggcgaaacgctgggaatgagtgaagtgaacggtcacgcgttaattcgtctcagcgcaaggactggtgaaggcgtggacgtgctgcgtaaccatctcaaacagagcatgggctttgacaccaacatggaaggcggcttcctggcgcgtcgtcgccacctacaggcgctggaacaggcagcggaacatctacaacagggcaaagcgcaactgttgggagcctgggcaggtgaactgctggcggaagagttgcgtctggcacagcagaacttaagcgaaatcaccggggaatttactagtgacgacctgctggggcggattttctccagcttctgtattggtaagtaaccgcgcttacgaggccgcattctgactgtcagatgcggcttcgcttcattgttaccactcctgttattcctcaaccctttttttaaacattaaaattcttacgtaatttataatctttaaaaaaagcatttaatattgctccccgaacgattgtgattcgattcacatttaaacaatttcagaatagacaaaaactctgagtgtaataatgtagcctcgtgtcttgcgaggataagtgcattatgaatatcttacatatatgtgtgaccagtaaatggttcaatattgacaacaaaattgtcgatcaccgcccttgatttgcccttctgtagccatcaccagagccaaaccgattagattcaatgtgatctatttgtttgctatatcttaattttgccttttgcaaaggtcatctctcgtttatttacttgttttagtaaatgatggtgcttgcatatatatctggcgaattaatcggtatagcagatgtaatattcacagggatcactgtaattaaaataaatgaaggattatgtaatggaaaactttaaacatctccctgaaccgttccgcattcgtgttattgagccagtaaaacgtaccactcgcgcttatcgtgaagaggcaattattaaatccggtatgaacccgttcctgctggatagcgaagatgtttttatcgatttactgaccgacagcggcaccggggcggtgacgcagagcatgcaggctgcgatgatgcgcggcgacgaagcctacagcggcagtcgtagctactatgcgttagccgagagtgtgaaaaatatctttggttatcaatacaccattccgactcaccagggccgtggcgcagagcaaatctatattccggtactgattaaaaaacgcgagcaggaaaaaggcctggatcgcagcaaaatggtggcgttctctaactatttctttgataccacgcagggccatagccagatcaacggctgtaccgtgcgtaacgtctatatcaaagaagccttcgatacgggcgtgcgttacgactttaaaggcaactttgaccttgagggattagaacgcggtattgaagaagttggtccgaataacgtgccgtatatcgttgcaaccatcaccagtaactctgcaggtggtcagccggttagtctggcaaacttaaaagcgatgtacagcatcgcgaagaaatacgatattccggtggtaatggactccgcgcgctttgctgaaaacgcctatttcatcaagcagcgtgaagcagaatacaaagactggaccatcgagcagatcacccgcgaaacctacaaatatgccgatatgctggcgatgtccgccaagaaagatgcgatggtgccgatgggcggcctgctgtgcatgaaagacgacagcttctttgatgtgtacaccgagtgcagaaccctttgcgtggtgcaggaaggcttcccgacatatggcggcctggaaggcggcgcgatggagcgtctggcggtaggtctgtatgacggcatgaatctcgactggctggcttatcgtatcgcgcaggtacagtatctggtcgatggtctggaagagattggcgttgtctgccagcaggcgggcggtcacgcggcattcgttgatgccggtaaactgttgccgcatatcccggcagaccagttcccggcacaggcgctggcctgcgagctgtataaagtcgccggtatccgtgcggtagaaattggctctttcctgttaggccgcgatccgaaaaccggtaaacaactgccatgcccggctgaactgctgcgtttaaccattccgcgcgcaacatatactcaaacacatatggacttcattattgaagcctttaaacatgtgaaagagaacgcggcgaatattaaaggattaacctttacgtacgaaccgaaagtattgcgtcacttcaccgcaaaacttaaagaagtttaattaatactacagagtggctataaggatgttagccactctcttaccctacatcctcaataacaaaaatagccttcctctaaaggtggcatcatgactgatcaagctgaaaaaaagcactctgcattttggggtgttatggttatagcaggtacagtaattggtggaggtatgtttgctttacctgttgatcttgccggtgcctggtttttctggggtgcctttatccttatcattgcctggtttagtatgcttcattccgggttattgttattagaagcaaatttaaattatcccgtcggctccagttttaacaccatcaccaaagatttaatcggtaacacctggaacattatcagcggtattaccgttgccttcgttctctatatcctcacttatgcctatatctctgctaatggtgcgatcattagtgaaacgataagtatgaatttgggttatcacgctaatccacgtattgtcgggatctgcacagccattttcgttgccagcgtattgtggttaagtagcttagccgccagtcgtattaccagtttgttcctcgggctgaagattatctcctttgtgatcgtgtttggttcttttttcttccaggtcgattactccattctgcgcgacgccaccagctccactgcgggaacgtcttacttcccgtatatctttatggctttgccggtgtgtctggcgagttttggtttccacggcaatattcccagcctgattatttgctatggaaaacgcaaagataagttaatcaaaagcgtggtatttggtagcctgctggcgctggtgatttatctcttctggctctattgcaccatggggaatattccgcgagaaagctttaaggcgattatctccagtggcggcaacgttgatagcctggtgaaaagcttcctcggcaccaaacagcacggcattatcgagttttgcctgctggtgttctctaacttagctgttgccagtagcttctttggtgtcacgctggggttgttcgattatctggcggacctgtttaagattgataactcccacggcgggcgtttcaaaaccgtgctgttaaccttcctgccacctgcgttgttgtatctgatcttcccgaacggctttatttacgggatcggcggtgccgggctgtgcgccaccatctgggcggtcattattcccgcagtgcttgcaatcaaagctcgcaagaagtttcccaatcagatgttcacggtctggggcggcaatcttattccggcgattgtcattctctttggtataaccgtgattttgtgctggttcggcaacgtctttaacgtgttacctaaatttggctaaatccttcaagaagccagccattcgctggcttcttgcctctcaggaaatcacttatgtccaaatggcaactcgcctgatcctccttcaccacgtatgctttgcgtcaccttactatcaggacgctttagcccatgtcccgctttttgatttgtagttttgccctggttttactttatcccgccgggattgatatgtacctcgttggtttaccgcgcatcgccgccgatctcaatgccagcgaagcgcagttgcatattgcgttctccgtatatctggcggggatggcagctgcgatgttatttgccggtaaagtggccgatcgtagtgggagaaagccggtcgccatacccggcgcggcgctatttattattgccagcgtgttctgtagtctggctgaaaccagcacgttatttcttgcaggccgatttctacaggggttgggcgcaggctgttgttacgtagtggcgttcgctattttgcgcgacacgctggatgatcgacgtcgggctaaagtgctgagtttactcaacggtattacctgcatcattccggtgttagcgccagtgctcggacatctgattatgcttaaattcccgtggcagagtctgttctgggcgatggcaatgatgggcatcgcggtactgatgttgtctttgtttattttaaaagaaacgcgcccagcggcccccgcagctagcgataaaccacgagaaaatagcgagagcctgcttaaccgttttttcctcagccgtgttgttatcaccaccctcagcgttagcgtgatcctcactttcgtcaacacgagtccggtattgctgatggaaatcatggggtttgagcgcggtgaatacgccaccattatggcgctgaccgctggcgtcagcatgaccgttagtttctccacgccatttgcgctgggaatttttaagccacgtacgttgatgatcaccagccaggtgttattcctggcggcggggatcactcttgccgttagtccttcccatgcggtttctctgtttggtatcacgctgatttgcgccggtttcagcgtaggttttggtgtggcgatgagtcaggcgttagggccgtttagtttacgcgcgggcgtagccagcagcaccttaggtattgcgcaggtttgcggtagcagtctgtggatttggctggcagcggtggttggtatcggcgcatggaatatgctgatcgggattctgattgcctgtagcatagtgagcctgttgctgattatgttcgtcgcgcctggacgccccgttgccgctcatgaagaaatccatcaccacgcttgatctcaatctgctgctttgtctgcaactgctgatgcaggagcgcagcgtaaccaaagcggcgaagcggataaacgtgacacctagcgcggtgagtaagagcctggcaaagttaagagcgtggtttgacgacccgctctttgtgaacagtccgctgggtctgagccccacaccgctgatggtcagcatggagcaaaatctggcggagtggatgcaaatgagcaacctgctgctggataaaccgcaccaccagacaccgcgcggcctgaagtttgagctggcggcggaaagtccgctgatgatgatcatgcttaatgcgctgagcaaacagatctaccaacgttacccgcaggcgaccatcaaattacgtaactgggattacgattccttagatgccattactcgtggtgaagtggatatcggtttttccggtcgcgaaagccatcctcgcagccgggagctgttaagcagcctaccgttagccattgattatgaagtgctgtttagtgatgtgccctgcgtctggttacgcaaagatcatccggcactgcatcaaacgtggaatctggacaccttcttacgttatccgcatatcagcatttgctgggaacagagcgatacctgggcgctggacaatgtgttacaggagctgggacgcgaacgcacgattgctatgagcctgccggaattcgagcagagtctgtttatggcagcgcaacccgacaatctgctactggcgaccgcgccgcgctactgtcagtactacaatcaactccatcaactgccgttggttgctcttcctctcccgtttgacgaaagccagcaaaaaaagctggaagttccttttaccctgctgtggcataaacggaacagccataatccgaagatcgtctggttacgggaaaccattaaaaacctttacgcgagcatggcataaccgaatcgtatgaaacgcgacccaatttcacaataaaatgtaaaaaagttgtaataagcttgtctgaatcgaacttttagccgctttagtctgtccatcattccagtaaatgattactcttgtattcataatggaccattaagcatggagcgaaaaatggcgactcactttgcccgagggattttaacggaaggacatctgatttctgttcgtctcccctcccagtgtcatcaagaagcccgaaacattccccctcatcgtcaaagccgttttctggcgtccagaggtttactcgcagaactgatgttcatgctgtatggcattggcgaattgccggaaatcgtcaccctgccgaaaggtaaaccggttttcagtgataaaaatttgcctagcttttccatttcctatgccgggaatatggttggcgtggcgttaacaaccgaaggtgaatgtggcctcgatatggaactacagcgtgcgacgcgcgggtttcatagcccacacgcgcccgataaccacaccttttccagcaatgaaagcctatggatcagtaaacaaaacgatcctaacgaagcgcgggcgcagctcatcacgctgcgccgaagcgtgctaaaactaaccggtgatgttttgaatgacgatccgcgcgatctgcagctgctgcccattgccggacgcctgaaatgtgctcatgtaaatcatgtagaagcgttatgcgacgcggaagacgtgctggtgtggtccgtggcggtcacgcccacgattgaaaagctcagtgtctgggagttagatggcaaacacggctggaaaagcctgccggatattcacagccgcgccaacaatcctaccagccggatgatgcgttttgcccaactctctaccgtgaaggcttttagcccaaattgatagacaaccacaggagtcatcatgtctgaaaaattgcaggtggttacgttactggggagcctgcgcaaaggcagttttaatggcatggttgcacgtaccctgccgaaaattgctccggcgagcatggaagtcaatgcgttaccatccattgccgacattcccttgtatgacgctgacgtacagcaggaagaaggttttccagcaacggttgaagctctggcggaacagatccgtcaggctgacggtgtggtgatcgtcacgccggaatataactacagcgtaccgggtgggctgaaaaatgccatcgactggctttcccgcctgccggatcaaccgctggccggtaaaccggtattgattcagaccagcagtatgggcgtgattggcggcgcgcgctgtcagtatcacctgcgccagattctggttttcctcgatgcaatggtgatgaacaagccggaatttatgggcggcgtgattcagaacaaagttgatccgcaaaccggagaagtgattgatcagggtacgctggaccacctgaccgggcaattgaccgcatttggtgagtttattcagcgagttaagatctaaataaaaaacccgccagcaatcatgcatggcgggtttttaacgcgctatcgattttagtgagcgtcgataaagacaatcttcaggataaacagcagcgcaacgatgattacgcacgggcttagatcacgcagacgtccggtaccgattttcatcacgcagtaggagataaagcccagcgcgataccttcggtaatgctgaagctgaacggcatcatcacggcggtaataaacgccggaacagattcagtaagatcctgccagttcacgcgtgccagactggaagtcatcagcacgccaacgtaaatcagcgcaccagctgcagcgtagcctggcaccatccccgccagcgggctcagaaagataaccagcaggaacagcagaccaacaaccactgccgtcagaccggtacgaccgccaacgcttacgccggaagaggactcaatataagccgtaacggaagaagtaccgataaagctaccggtcacggaagagatactgtcgacatacagcgcctgcttcatgcgcgggaatttccccttctcatccgccagacctgctttatcggtcacgccaatcagcgtaccggaggagtcaaacaagttgaccaacatgaaagagaaaatcacccctgccagcccgaggttaaagctcccggctaaatctacatgacccacaactgtcattacgctcggcggcgcagaaacgatgccattgtagtgcacatcacccagcatccagcccagcagcgtcgtcaccacgatagaaaccagcaccgctgcgtgaatgttgcggctggccagaatagcaatgatgaagaagccgaggatacccagaagtacgctgtgagaagtcagattaccgatgctcaccagcgtttccgggttagcgacaatcacacctgcgtttttcagccccatcatgccaatgaacagaccgataccgctggtaatacccacacgcagactcaccggaatgttggctatcatccagtagcgaacgcggaaaatcgtcagtaacagcagacctatcgcgccccagaagattgcgcccatcccgacctgccacggcaagcccatcgcctgtacaacgacaaaagcgaagaacgcattcaggcccatagcgggtgccagtgcaactggcaggttagcaaacagtcccatcataatactgccgaatgcagcgatcagacaggtagtgacgaagacggcgctggtatccatgccagcaacgccaagaatttgcgggttaacaaaaacgatgtaaaccatcgtcaggaaggtggtaaaaccggcgatcacttcggtccgtgccgtcgtgccatgttcgcgcagtttaaacacgcgttccagcatcccctgaccagaagtctgggtggtatgttgatgactcattatctatttccgaacaaggagggaaaatccgtcgctatcgtataccaaaatgcgacaataggcgcgtttgtgagagacttttttattggatttacttatacggcaacgattgcgttgcgcaaatcggctctacgaaaacgttaaactgattaaaaaggaaaggcatgtcccggatagaagcggtatttttcgactgcgacggtacgctggtcgacagtgaagtcatttgctctcgcgcatatgtaacgatgtttcaggaatttggtattacgctcgatcctgaagaggtattcaaacgtttcaaaggtgtaaaactgtacgaaattatcgatattgtttcccttgaacatggtgttacgttagcgaaaacagaagctgaacacgtttaccgtgcagaagtcgctcggctgttcgatagtgaactggaagccatcgaaggggctggagcgctcctgagtgcgatcactgcgccaatgtgtgtggtatctaacggcccaaataacaaaatgcagcattctatgggcaagctgaatatgttgcactacttcccggataaactgttcagcggctacgatattcagcgctggaagccagacccggcgttaatgttccatgcggcaaaagcgatgaatgtaaatgtagaaaactgcattctggttgatgacagtgttgccggtgcacaatctggtatcgacgcaggtatggaagtgttctacttctgcgccgacccgcacaataagccgatcgttcacccgaaagtcaccacctttacccatcttagccagttacctgaactgtggaaagcgcgtggttgggatattacggcataattcttcacactcccttcacttaccccgcttaaattggcgctcaaaggtaagtaaagggagtttgatatgtctgttagtcgtcgggtaatacatcacggactttattttgcagttttaggaccgttaattggtgttctgtttcttgtcctctacatattcttcgcaaaagaaccgctggttctttgggtgataatacatccaatttttctcttattgagcataactacgggagctattcctgcgttgttaaccggtgtaatggttgcctgtctgccggaaaagatcgggagtcagaaacgttatcgttgtctggctggtggcataggtggcgtcgttatcaccgagatctattgtgcagttattgtacatattaagggcatggcttccagcgagttgtttgaaaacattctttctggtgacagtctcgttgtccgcatcattcctgcattgctggcaggtgtggtgatgagcagaatcattacccgtctacccggattggatattagttgtcctgaaacagactctttaagttaagcgggatactttatctttgggctactcaaaagcagacaggatgtttctatgactcaaaatatcaggccgttaccccaattcaaatatcatcccaagccactggaaacaggcgcatttgaacaggataaaaccgtagagtgcgattgctgtgaacaacagacgagtgtttattacagcggtcccttttattgcgttgatgaagttgaacatctctgtccgtggtgtattgcggacggttctgctgctgaaaagtttgcaggtagttttcaggatgatgccagcatagaaggtgttgaatttgagtatgatgaagaggacgaatttgccggtattaagaacacatatcctgatgaaatgctgaaagagttggttgaacgcacgccaggttatcatggatggcagcaggaattctggctcgcgcattgtggcgatttctgtgtttttatcggctatgtgggctggaatgatataaaagatcgcctcgatgaatttgccaaccttgaagaagattgtgagaatttcggtattagaaattctgatctagctaaatgcctgcaaaagggtggtcattgtcagggttatctcttccgctgtctccactgcggcaagctgagactgtggggtgattttagctaattatttaaataatgagaacaggccggagcgtaattcacacatccggccttatttcttaagcttaaccgagtgctaattctgcggcagcggctttatcagcgattaccatcaggctaggatgcagctgcaacacggaagctggaacatcttcggtaaccggaccttgcagaacatttttcagtgcctgcgctttacccgcgccgctgacaattatcagcaagtttttcgccgccatgatgcttttcggccccatcgtcacgtagctgtcaggcactaagctaaagtcgccgcccaactcgccatgcgccacaatatcaaccatctctccctggatcgggaactccacggtttgctcatggaaatgggtcgtattcggcaaattgccacaaaaatgaccatctgcacctaatcccagcaccaccaaatccagtccgccttcacgcgccagtttctgatcatgctcgcggtagttatcaatagtgagcttctggatattctcttctttgatccccgcaggggtgaaaaacagattacgcagattggtaatcgttacgccttctccctctttgccgcgaaatggaatttcatcaaaattatagaaatagcagttatcgtaccagggcttacctttaaccagggtggtgaggtattcatacatgcctttgggcgtgctaccggcggtaattgccaggttaacacgacgcgtcttgctcatataaccaagcagatggtgtgccgcgacacggctcatttcctggtaatcttcggtaatgattaatttcatcttaatgccttattttatttaaataatttctgtacaaaggctgcataggctggtcgccagacatccatttcatggttcagacccggatattcctggtaatcaaagttaatttttttctgctcaagctcagttttcagcccggcgatatccttgccggttacgacatctttatcccccacaaccacagtaaaattacgtagttgctggttgatagctgccggatcgttcagtcgggccgcgacaccttcatccggtacggttgtcgtggtaacaccactgaatgtggccagccagccaaagctttccagatgattcattccggaaaccagcgcctggtacccgccttgactaagccctgccagcgcgcggccatcggcatctttacggacattaaaacgcttgctaatcagcgggataatatcgttcatcagttcgcgatctgccgctttagcattcagcggataaaagactttacgtctttcctgaggcacgaaatcttcgggaataatgcccttcgcatcggtttctgtatccgggatcaccaccagcatcggtttaattttcccttcagcaagcaggttatccatgatttgcgggatacgcccctgatcgatagcggaacgtccggtatcaccaaagccgtgatagaaatagagcactggcaaaggctcgcccatgccggtgtatcctggcggggtccagacatacatctgacgttcagattgcaatgcgttggagtggtaagttatggcgatcaaatcaccatgcgcaacagaacgcgtatccagataactgcctggcaccagaatcatactggagttaacctggcgctgaggattagtcattgcggtgcctgtatcaatgctgcgtacaccatcaacattgaaaaaatactcgtacaggttgcctttcaggataggtgtgcgccagctccagactcctgcttcgtctttggtcatcgggtgaatattgtccggaaccggaacacccaccactacagagacattttttgccccaggggcaaagtagcgaaaggtcacgctgttatcggcattgacctgagtcacatactgtttcaccgggatagtgggtgccgggctggctggcatatccgctgctatggcccactgagcagaaataccgctggcaatagccagcgttaaagcagcaatttttatattcatcgtaatattcctttcattaagttccattaccaccagatttcagcctgggcaccgacagcaaactggtcgtctttattgtcttcaaaggtgaagccatccagttcgttttccagggctttgatatacgtggcgtagaaacgaatttccggacggctggtcaacatactggtattgactttaaaggtatggaagagcgtggttttataaccagactcattaaatttattactattcgcatctttgttttgctgggtgaaatagcccagttcaacacctgtctggttatattggtcccaaatataggccgggcgaacaaccgcacgaatagattcgaaatcagagtgggcgcctgtttcgtagctatatatatcgttaccgaaggagtaaacaatcgcgttagctacaatgaaatgatcgccaatataggcttcgccctggctagtcagacgtaccgctgttccgccggtgtgatcaccataataacgaccattaaaggtggtaaatggacttgcgccagcataacggccaaagttactggcgatagagttattcgcgaccaggaaggagaattcgttgaagccacctttatcaaatttctgcgttaaagatgtgccaaacatccaggtatctttccagtcataatacccgttattatcctgattatctttttcgcttgcgctttcgtttgccgtgacataacgaccacttaccattaaggtggctttatcccataacgggatatctttatagcgtaaatcaatggtattggtattaatctgctgtttgttttgcaggctgcgatcgtaatcatcgacatcttcgcgaaccagcgcgatatcaattttacccggaccgactttccagttttccagacctacacccgctgcggcatcagtacgctgcgttttccagtcaagcatctggatttcaattttcggcgcaccgtgtttacccacccagaaatcagcctctggcgcaaagggcaggaaacctttggtggtaacgtacatatcggagaactgcatatagttctcgccaccggcgttatcgccaaaccagccggtagagtactgctgaccaacgttaccatccatcatcacaacggcatcaacccgtttgccgttttcgttgtagacacgttgttttaactgcaaatcaaaccagccggagtattcgttaccaaagcggcccagagaaccaatcgcccaacttttaggactaccatgagaggcggtcccccaaccagaacggtaatagccgttgtaactaaagccaatttcatctttcacaaatttactgaaatctttcagagtcatggaagaataaatgctgcctgtctcactggcatttttctcttcatttttgaccagtacagcatcaggttttgcggcactactggtcgggaacggattggcggcatacccttgatcattcgtacttacgctacgattcaccgtcgctggcgtatactttttcttctcttcatctttatactttttgagttcgctttgcgtttctcttaacgccttttctaataactcaaggcgttgttccaccgttaaactttcagccaaactttgtgcagaaaaggctaacggtgccattaataagatggcagaggtaataagatttcgtctaaacataatatccctttatggtgcaaagaaagaattaacgcatcgcatccagactgttctgaatgcgacgataattaaggtgctttaatggttattttttttaaactcagcccccgcgtcttgatcacctctgcataccatccgaagcttttcttgcgtgttcttgtgaggcttccttcgccattatcatcacgatccacataaataaagccgtagcgcttagacatttgactatgagatgcactgactaaatcaattggcccccaactggtgtaccccataatatccacaccatcggcaatcgcttcatttacctgtaccaggtgatcgtttaaataggcaattcgataatcgtcctgtatgctaccatccgcttcaacgctgtcttttgcgcctaatccgttctcgacaataaataacggtttttgataacgatcccaaagcgtatttaacagaacccgtaatccaaccggatcaatttgccacccccactcactacttttcagatgcggattggggatcatattcagtatgttgccctgcgcatttttattaatgctttcgtcgtgggaaacacaaccagtcatgtaataactaaaagagatgaaatcgacggtatgttttaaatcttctgcgtcactttcagtcatctcaatggtgatattgtggtcgcggaagaaacgctgcatatagccgggatactggccacgcgcctgaacatcaccaaagaacatccagcgccggttctcttccatggcctgcaacatatcctgtggctggcaggtgagggggtaaaccagcccaccgagaagcatattgccgattttcgcttcggggagcaggctatgacaggctttaactgcccgcgcactggcaaccagttgatggtggatagcctgataaacttccgcctcgccactctcttctgccagccccacgcccgtgaatggcgcgtgtaagctcatgttgatttcattaaacgtcagccataacgccactttatgttggtagcgagtaaagaccgtgcgggcgtaatgctcgaagtgatcgatgaccgctcgattagcccaaccgccgtagtttttcaccagcccatatggcatttcgtaatgggataacgttaccagcggcttgatccccgcctgcgccatttcatcaaacagccgatcgtaaaacgctaaccccgcttcattcggttcgacttcgtcgccctgagggaaaattcgcgcccaggcaatggaaatacgcagacaggtgaagcccatctcggcaaataacgcgatatcttccgggtaacggtgataaaaatcgatggcgacatctttgatattctctttccccaggatgcgcggttccatttttcccattacgccatgaggctgtaaatcactggtgctgatccctttgccatcttcctgccaggcaccttccacctgattggcagctgttgcgccaccccaaagaaatgtttctggaaatgctttcataattaactccttttatcgttagcgaatgatggataacagcggttcacctgcgcttatctgcgccgtgccgtggggtaatacgtccgtaaaatcatcgctattactgattaataccggcgtcgtcagatcaaatccggcctcgcgaatagcagggatatcaaaagaaatcagccgatcgcctgtattgaccttgtcacccacgttgacgtgagcggaaaagaatttgccgtccagttttacggtgtcgataccgacatgaatcaggatctccacaccatcatcactctcaatgccaatggcgtgtaatgtggcgaacaagctagcaattcgacccgcaaccggagaacgcacttcaccaacgctgggcagaatggcaatacctttacccaacaggccactggcaaacgtggtatcagcgacgtgaatgagcggcacaatctctcccgtcatcggactacagataccgccctgctcaggtggtgtaataacctctggtgttttctcttgcggggcaccctgcgctggctgacgtttagcggtgatgaaatgaagcatcaccgtaccgacaaatgcgcaaccgatggcaatgacaccgccaataacgctggcccagacggtgaaatcaattcccgtactcgggatggtttgcatgaaggtgaaaatacttggcaaaccaaaggagtagactttcgtttgcgcgtagccaataatggtggccccccaaagccccactgatacaggcgataacaaaggggtacttacgcggcaggttgacgccatataccgctggttcggtgataccaaacagactcgtcaacgccgcacttcccgccaccacttttttctgcgcatcgcgttcgcagaggaagacgccgagcgccgccccgacctgcgccataatggcgggcattaacagcgggatcatggtgtcgtagcccagcacggtgaagttattgatacacagcggcaccaggccccagtgcagtccgaacatgacgaagatttgccagaagccgcccattaccgcgcccgcaaatgcaggaaccgcctgataaagccagagataaccggcggcaatcagttcgcttatccaggtacttagcggccccaccagcagaaaggtgacgggtgtgataaccatcagacatagcaatggtgtgaagaaatttttgattgcgctcggtaaccacgcattaagtcggcgttccagaatgctgcacaaccaggcagaaaaaataatgggaataacgctactgctgtaattcaacaatgtgaccggaatacccaggaaatccagccccagcgcatccgctttttgcccgttctcgaaagcagtcagaattaatggatgcactaacgctccaccaatcaccatggcagtaaatggattaccgccgaagcgtttccccgcggtgtatcccaggattatcgggaagaaccaaaacaaggcatcactggcgctgaataaaattaaataagtaccactttgttcggtcgtccactgaaaagtgagcgccagagccagcatacctttcaagatcccggttgccgccatcaaaccgatcagaggcgtaaaaataccactaataacataaacaaagcggtttagcagattacctttatcatcattttccggtgcctgttgcgctttttcgtcaaggcctgccacactgttaaccgccaggaagacatcggccacatggttacctatgaccacctgaaactggccaccgctttccaccaccataataataccgggggtctttttcagtacctctgcttgcgctttgctttcatcctttaatttaaaacgtaatcgcgttgcgcaatgcatcagactcacaatgttatctgcgcccccgactcctgcgactatttttctggctaactccgtcataacttgccctctaccgctttgcggcaaaactccaaaaaaaaacctgaaaaaaacggcctgacgtgaatcaagcaatttttttcaggttttgcccgcttagtgcggtaacaatcctttactcagtaataatatttcagtgttctttgcgcacgcgctctatatttatggctaaaaacataatctctgcgggactaattttacgttgatactgcaaaccaataaaaatggcgatccgttccgcacattgccatgcttgcgggtaattttgttttactgcttgttgtaaactttcatcactatcgttaatactagcatgttcaagaatacgccaggataaaaacttcagatgtgtaaccagtcgctgataactcaagctttcttcctggtaattaaggctgaactgaaattttattaattgcagcatttcgcgcattaactgcgtgacacctgcaacatcctccatatttccgctcatttgggcactgaccagatgcatggcaataaagcccacttcatctttcggtaactgcacgcccaaccgtttatcaataatggttaacgcttcttcccctagctggaactctttcgggtaaagccgctggatatcccacagcaacgggttgggcagcaacacgttttgctgaaagcgtttaatcgcaaactggcaatggtcagttaggctgatataaatactgtcctgtaattttcccaagcgctcctgcgctaaagagataatacgatcacaggttgccatcacctcaagaggaatatgacttaagagttcgcttaatcgcccgttcagttcatgactgctcaaggcatactctttttctattccactactgttaattctttcgccagcgcgtttttgaaagccaattccgcgccccatgacgactttttcccgctgttgatcatcaataaccaccacaacattattgttgagaattttggtgatttgcatgttcatagcaaggaccttttttataaacaaaaaaacccgacttcaccagtattctctggttatgtcaggttttgcctgcgaatgcagtaacaatccagtcatttattaatggtttttataacgaacatccaggttcggaaattaatttaattgcgtgcagagaaaatagcaatgcgctattgataaaaatatgaccatgctcgcagttattaactttgtgtaattttaggaatttataaagttatatataacaaatcccaataattaagttattgggatttgtctggtgaattatttgtcgctatctttccccgccagcagtttatccagctcatcgccaccgacgtgacggaaatcctgccccttcacgtagtagaagataaactcacaaatattctggcagcggtcgccaatacgttcgatagaacgcgcgcagaacagcgcagtaagtacgctcggaatggtacggctatcttccatcatgtaggtcatcagttgacgaacaataccttcgtattcctgatcgacttttttatcttcacgataaatacgtaccgcttcgtcaatgtccatccgcgcgaacgcgtccagcacgtcgtgcagcatctggatggtatgacggcccaggctctccagacttaccagcaacggctgatgctgctgggagaatttctccagcgcagtacggcagattttgtccgccacgtcgccaatacgctccagctcggcaatggttttactgatcaccataaccagtcgcaggtcgctcgccgtcggctgacgtttggcgataatgcgcacgcaggcttcatcgatcgccacttccatcatgttgacgttcttgtcgccttcgatgacgcgcttcgccagatcgctgtcctggttatgcatcgcggtgattgcatcagaaagctgctgctccaccatgccgcccatggtcatcacctgcgtgcggatactttccagttcggcgttgaactggccggaaatatgtttattaagattgagactgtccataacgcactcctgaatcaaccgtaacgaccggtgatgtagtcttctgtttgtttcttcgctggcttggtgaacagatcgtccgtgttgctgaactcaatcaattcgcccaggtacataaacgccgtgtggtcggaacaacgcgcagcctgctgcatgttgtgggtgacgatcaccacggtgtaatcctgcttcagttcggtgatcagctcttcaatacgcccggtagagatagggtcgagcgcgctacacggttcgtcgagcagcagcacttccgggcgaatggcgataccacgcgcaatacacagacgctgttgctgaccaccagagagagagtaaccgctctggtgcaatttatctttggtttcgttccacaatgcggctttggtcaatgcccactgcacgcgctcgtccatgtcggcacgggagagcttctcaaacagacgaacgccaaaagcgatgttgtcgtagatggacatcggaaacggcgtcggtttctggaacaccatgcccactttcgcacgcagcagtgcgatatcctgagagttggtcaggatgttgtcgccatcaagcagaatttcaccttccgcacgctgctccgggtacagttcaaacattttgttgaaggtacgcagcagcgtgcttttaccgcagccggacggcccgataaacgccgttacctggtttttagcgatatccaggttgatgtttttcagggcatggaatttgccgtagtagaagttcaaattacgaacctgaattttactcggggcagtttcaaccatactcattgcaatcttttcctcatcgtgcctgatgcacttcgctaatcaggcttaccgtaggccggatcaggcgttcacgccgcatccggcaaagtgttaaccgtgtacagagtcaaaaaggcgctcggtcggtcccctcgcccctctggggagagggttagggtgaggggaaaaccgtgtcagcaatatcaaccgtgtttattcttcgcaaaaacaacgcgcgccagaatgttcagcagcagtacgcacagggtaatgatcaataccccggcccaggccaattgctgccattccgcaaacgggctcatcgcaaacttaaagatcgtcaccggcaggttggcgatcggctgcatcatgtccgtgctccagaactggttggagagcgcggtaaacagcagcggcgcggtttcaccagcaatacgggcaatcgccagcaggataccggtcataatcccggacacgctcgctttcagcgtaatcgcagagatcatcttccacttcggtgtacccagcgcataagccgcttcacgcaggctgtacggcaccagtttcagcatgttctcggtggtgcggataacaatcggcacctgcaacaacgccagggcaatcacgcccgcccagccggagaagtgctccatctgcgccaccacaatggtgtaaacaaacagaccaaccacaatgctcggcgcagagagcagaatgtcgttaatgaagcgaatcacttctgccagccaggatttacgaccatattccgccagataaatccccgccataatgcccagcggcgtaccgaataccgtggcccacaaaattaacagcccgctacccgccagagcgttcgccagaccaccaccttccgtattgggcggcggcgtcatttcagtgaacagcgccaggctcataccgtcgataccgcgagtgatggtggacattaaaatccagatcagccagaacaggccgaaggccatcgtcgccatgctgagcgtcagcgcaatacggtttttgaggcggcgacgcgcctgcattttgcggcgagattcagccagcgccgcagtggtttgcatttcaaccatagccattagcgtgccccctcattcttagccaggcgcataatcataaacttgcttgcggcgaggacgatgaaggtaatcacaaacaggatcaggcccagttccatcagtgcggcaacgtgcagaccggattccgcttccgcaaattcgttcgccagcgcagaggtgatactgttgcccggcatatacaggctggcgctgtcgagctggtaggtgttaccgatgataaaggtcaccgccatggtttcaccgagcgcgcggcccagccccagcatgatgccgccgataacaccatttttggtgaacggaagaacgatacgccagataacttcccaggtggtgcagccaataccgtaggcgctctctttcatcatcaccggggtttgttcgaacacatcacgcattaccgccgcaatgtacggaataatcatgatggcgaggatcacgcctgccgcgaggataccgataccaaatgcggggccagagaacagcgcgccaacaatcgggatattgctcatgatattgccgaccggctcctgaaagtaaacggcgaacagcggcgcaaagataaacaggccccacatgccgtaaacgatacttggaatggctgccagcagctcaatggcgatacccagcgggcgtttcagccagccaggcgcaagctcagtcaggaacagggcgataccgaaactcaccgggacggcgatcagcagcgcgataaagctagtcaccaacgtaccgtagatcggcaccagcgccccgtagatatcgttcggtgcatcccactctttggtccataggaaagccagaccaaatttctgaatgctcggccaggaggagatgatcagagagacaataatgccacccaacatcaatagcacaatcagcgccgccagttttaccagcacgctgaaaattatgtcgccctttttacccggtgggttaaaagcaggcttggttgcagccataagttactcttcagttaaacgcgtttacaaagtcattttgtaatgccggatgcggcgtaaaacaccgtacccggcctggagttttattagtacagcggcttaccgctactgtctttaatattggtcttccacgcagcgcgaacctgttcaactacactatccggcaggctggcgtaatccaggtcgttcgcctgtttagccccggttttgtacgcccagtcgaagaatttcagcacttctgtgccttgttctggtttcttctgatctttgtggatcagaatgaacgtggtagaggtaataggccatgcatcttcgcctttctggttggtcagatcctgagcgaaggttttgctccagtctgcaccttttgctgcattagcgaagttttcttcggtcggactaaccggtttaccatcagcggagatcagtttggtgtacgccaggttgttctgcttcgcgtaagcatattcaacataaccaattgcacccggcagacgctgaacgaacgcggcgataccgtcgttacctttaccgcccagaccgatcggccattttacggtagagccagtaccaacgttgtttttccactcttcgttcactttcgccaggtagctggtgaagacgaaggaagtcccggagccatctgcgcggcgtactacagcaatgttttgactaggcagtttcagacccggattcagtttggcgatggcttcatcatcccacttcttgattttgcccaggtagatgtcgccgagggttttaccatccagcaccagttcgccagacttcagccctggaatgttaaccgccagcaccacgccgccaatcacggtcgggaactggaacagaccttcctgagccagtttttcgtcagacagcggcgcgtcagaggcaccaaaatcaacggtattagcgataatctgttttacgccaccggaagaaccgataccctggtagttaactttattaccggtttctttctggtaagtgtcagcccatttggcatacaccggcgcagggaaggttgcacctgcacctgtcaggcttgcttctgcaaacacagagaaagcactcatgcttaaggtcgcggcgacaacagttgcgacggtggtacgcataactttcataatgtctcctgggaggattcataaagcattgtttgttggctacgagaagcaaaataggacaaacaggtgacagttatatgtaaggaatatgacagttttatgacagagagataaagtcttcagtctgatttaaataagcgttgatattcagtcaattacaaacattaataacgaagagatgacagaaaaattttcattctgtgacagagaaaaagtagccgaagatgacggtttgtcacatggagttggcaggatgtttgattaaaaacataacaggaagaaaaatgccccgcttacgcagggcatccatttattactcaaccgtaacgctttttgccaggttacgcggctggtcaacgtcggtgcctttgatcagcgcgacatggtaagccagcagctgcagcggaacggtgtagaagatcggtgcaatcacctcttccacatgcggcatctcgatgatgtgcatgttatcgctacttacaaaacccgcatcctgatcggcgaagacatacaactgaccgccacgcgcgcgaacttcttcaatgttggatttcagtttttccagcaattcgttgttcggtgcaacaacaataaccggcatatcggcatcaattagcgccagcggaccgtgtttcagttcgccagcagcgtaggcttcagcgtgaatgtaagagatctctttcaacttcaatgcgccttccagcgcgattgggtactgatcgccacggcccaggaacagcgcgtgatgtttgtcagagaaatcttctgccagcgcttcaatgcgtttgtcctgagacagcatctgctcaatacggctcggcagcgcctgcagaccatgcacgatgtcatgttcaatggaggcatccagacctttcaggcgagacagcttcgccaccagcatcaacagcacagttaactgagtggtgaatgctttagtggatgccacgccgatttctgtacccgcgttggtcattagcgccagatcggattcgcgcaccagagaagaacccggaacgttacagattgccagactaccaaggtaacccagctctttgctcagacgcaggccagccagggtatccgcggtttcgccagactgactcaaggtgatcatcaggctgttacgacgcacggcagatttgcgatagcggaattcagaggcgatttcgacgtcgcacggaatacctgctaggctttcaaaccagtagcgggaaaccataccggagttataagaagtaccacaggcgaggatctgaatatgctcaaccttgctcagcagttcgtcggcgttcggtcccagctcgcttaaatcaacctgaccgtggctgatgcgtccggtaagggtgtttttgatcgcgttcggctgttcgtagatctctttctgcatgtagtgacggtaaatgcctttatcgcccgcgtcatattgcagattggattcgatatcctgacgttttacttccgcgccagttttatcgaagatgtttacgctacggcgagtgatttccgcaatatcgccctcttcaaggaagataaagcgacgggtcaccggcaacagcgccagctggtcagaagcgataaagttttcgcccatccccaggccaatcaccagcggactaccagaacgtgccgccagcagggtatccgggtgacgggagtccatgatcactgtaccgtacgcaccacgcagctgcgggatagcacgcagaacggcctcacgcagagtcccgccttgtttcagctcccagttcaccagatgggcaatcacttcggtgtcggtttcagaaacgaaggtatagccacgcgcttttagctcttcacgcagcggttcatggttttcgatgatgccgttatgcaccaccacaatgtgttcagaaacatgcggatgcgcattcacttcactaggttcaccgtgggtcgcccagcgagtgtgagcaataccagtgccgccatgcagaggatgttcttccgctgcctgtgccagcatctggactttaccgaggcgacgcaggcgggtcatatgaccttctgcatcaacaacggccagaccggcagagtcatatccgcggtattccagacgacgtaaaccttcaagaaggatttctgctacatcacgttgcgcgatcgcgccaacaattccacacatagtttttgattccgatttatatcgttgtcggtcaacctgtatgcccgttttttcgggcgccccgagccttgtagagagtggggttatttttatagttactgcttgtgggagggagattatgttatctcctcatcccatgtgaccgggttagccggccagaatcactttttctttaccggacgacgccagccttctttctgagtctgcggcacacggctgatagctaatgcattttcgccgacattacgcgtcacagttgtacccgcagcaatggtcgcgcctttgcctactgttaccggggccaccagctgagtgtcggaaccaacaaacacatcgtcgccgataatggtcttaaatttattcgcaccatcgtagttgcaggtaatggttcccgcgccgatgttaacgttatcgccaatttccgcatcgcccaggtaagtcagatgaccagctttgctgcctttacccagacgcgcttttttcatctcaacgaagttaccgacgtgagcaccttccagcaactcagcaccaggacgcaaacgggcaaacgggccaatggtacaggccgctgccagattcgcatcttccacaacggtatacggactgatttcgcaatcatcgccaatcacgctgtttttaatcacgcaaccggtgccaattttcacgcgatgaccgagagtcacgttgccctcgatgataacgttagtatcaatttcaacatcgcgcccgtgagttagcgtaccacgcagatcaaaacgcgctggatcgcgcagcataacgcctgctaacagcagtttttcagcctgttcggactgataaacacgctccagacgggagagttgcaggcggttattcacgccttctacttcgcttaaacgttgcggatgaacggcgacgatttcacgcccttcctgatacgccagcgcaataatgtcggtgatgtagtattcgccctgagcattattgttggtcagcttcgccagccagcgtttcatatctgcgccgttggcaatcagaatgccggtgttgatctcctgaatctgacgctgctcgtcggtggcatctttgtgctcaacaatgccggtaactttgccgttttcacgggtgatacgtccataaccggtcggatcatccagtttcaccgtcagcagaccaatgccaccctgcggtttagcatcacgcagacgctggagtgtttcgacagagatcagcggcacgtcgccgtagagcattaaaatgtcttcatcatcggcaaagaaaggtgcggcctgctgcattgcatgacccgtacccagctgctctgcctgaagcacccagttaaggttgtcgtctttcagcgcctgttttagcagatcgccgccgtgaccgtacaccaggtgaacgtgcgctgcgcctaattcattcgcagcatcaatgacatgctgaaccatcgctttcccggcaagggtatgcagcactttcggaagatcggaatacatgcgcgtgcctttgcctgcggcaaggatcactacgctcatagcattattcaacatacgcgtcctgactgtaatttgagaacgaatttaaaccgcttcaccttgaaaaaactacatttttttcatcgtgaaatggacagaggataaattgttcaataacggattatccccgctgacgaaagcgccattttcgaccatcgtcacgccttttgtctgcagaaaattaaggcagtaccttaatttaagcgtcaggtggatgtttttgctcttatttcgatcaatgaataaacaggaaaacaggggggttttatatcagcaggatctatgtgaacgctattcaggacgggtcacacgcgcaaaaaaaagccagcctgtttccagactggcttttgtgcttttcaagccggtgttacatcgcttttttggtcaactcgataacgcgcagctgcgcgatcgctttggccagttccgcagacgcctgagcgtaatctacgtcgccgtgagagctgctaatgtgctcttcagccttacgtttcgcttccatggctcgcgcttcgtcgagatcctggccgcgaattgcggtgtcggccagaacggtcacgttgccaggctgcacttcaagaatgccgccagacagatagataaactcttcgtgaccgtgctgtttcacgatgcgaatcataccaggcttaatggcggtgagcagcggtgcgtggccagggtagatccccagttcaccttcgctacccgttacctggattttctcgaccagaccagagaacatttgttgctctgcgctgacgacgtccaggtggtaagtcattgccatatcaccctccgattaaggcgttaaagttttttggctttttccacagcttcttcgatggaaccgaccatgtagaacgcctgctccggcaggtgatcgtattcgccttccatgatgcctttaaagccacggatggtgtctttcagggagacgtatttacccggagaaccggtgaatacttctgccacgaagaacggctgggacaggaagcgctggatcttacgagcacgcgctaccaccagtttgtcttcttcagacagttcatccatacccaggatggcgatgatgtctttcagttcctgataacgttgcaggatggactgaacgccacgcgcggtgtcgtagtgttcctgaccaaccaccagcgggtccagctgacggctggtggagtccagcgggtcaacggccgggtagatacccagagacgcgatctgacggctcagtaccacggttgcgtcaaggtgcgcaaaggtggttgccggagacgggtcagtcaagtcatccgcaggtacgtatactgcctgtacggaggtgatagaaccagttttggtggaggtgatacgttcctgcagaacgcccatctcttccgccagggtcggctgataacctaccgcactaggcatacggcccagcagtgcggatacttccgtaccggccagggtgtaacgatagatgttgtcaacgaacagcagaacgtcacgaccttcgtcacggaatttctcagccatggtcagaccggtcagagcaacgcgcagacggtttcccggcggctcgttcatctggccatacaccagggatactttgtcgataacgttggagtcggtcatttcgtggtagaagtcgttaccctcacgagtacgttcacctacgcccgcaaacacagagtaaccggagtgctcgatcgcgatgttacgaatgagctccatcatgtttacggttttacctacacccgcaccaccgaacagaccaactttaccgcccttagcgaacggacacatcaggtcgataactttgataccggtttccagcagttcctgagagttactcagctcttcgtaggaaggtgctgcgcggtgaatcgcccaacgctcttcttcaccgatctcgcctttcatgtcgaccggttcacccagtacgttcatgatacggcccagagtcgctttacctaccgggacttcaatcgggtgttcgaggtcttttacatccagaccgcgacgcagaccgtcggaggaacccattgcgatggtacgtacgataccgccgccgagctgctgctgaacttccagcaccagacgctcattaccattttgcacctcaagagcatcgtacacgcgcggtacggcatcctgagggaattcgacgtcaactacggcgccgattacctggacaatctttccagtagccatcttaaatcctctacgaaataacctgtttaaaccgcggcggccccgctgacgatctcggtgagttcctgagtaatgctggcctgacgagctttgttgtataccaactgcagctctttaatcaggctgccgccattgtcggtcgcggctttcatcgccaccatacgggcggcctgctcgctggccaggttttcaaccacgccctgataaacctgagattcgacataacgacgcagcagggtatccagcaacgccttcggatcgggttcgtacaggtaatcccaggatttatgtttcagatcatcatcatcacttgccggtaacggcagcagctggctgatggtcggaacctgagacatggtgttaataaatttgttgctgacaatgtaaagcttgtccagacggccttcgtcgtaggcctgcaacatcacttttaccggaccgatcagttcggacagggaagggttatcccccatgccggtgacctgggcaacaacattgccgcccacggagttgaagaagctcacgcctttgctgccgatcattgcgaggtcgcattgaacgcctttgtcggtccaggtcttcatttccgccagcagttttttgaacaggttaatgttcaaaccaccgcacaaaccacggtcggtgctcaccaccaggtagcccacgcgtttaacgtcgcggtcttccaggtaagggtgcttatattccagattaccgtgtgcaaggtgaccaatcactttgcgcatggtttctgcataaggacggctggccgccatgcgatcctggcttttacgcattttggaagcggcgaccatctccatcgctttagtgatcttttgcgtgttctggacgcttgcgatcttactacgtatctcttttgcgccggccatgagcttctcctcaatgccttgcggcctgccctaaggcaagccgccagacgttaccaggattgggttgctttgaaggaatcgaggatgcctttcagcttgccttcgatttcgtcgttgtagccaccggtctggttgatctcttgcatcaacggagcgtgatcacggtcgacgtaagccagcagagcggcttcgaagctgccaattttgctcagttcaacatccgccaggtaaccacgttctgctgcgaacagaaccagagactgctgcgcaacggacatcggcgcatactgtttctgtttcagcagttcggtcactttctgaccgtggtcaagctgcttacgtgttgcatcgtcaaggtcggatgcaaactgagagaacgctgccagttcacgatactgtgccagagcggtacggataccaccggacagttttttcatgatcttggtctgtgctgcaccaccaacacgggatacggaaatacccgggttaaccgcaggacgaataccggcgttgaacaggttggtttccaggaagatctgaccatcggtaatggagattacgttggtcggaacgaacgcagaaacgtcacccgcctgagtttcgataatcggcagtgcggtcagagaaccggttttccctttcacttcacctttggtgaaggcttcaacgtattcggcgttaacacgtgcagcacgctccagcagacgagagtggaggtagaaaacgtcgcccgggaatgcttcacgtcctggcggacgacggagcagcagggagatctgacggtaagcaacagcctgtttagacaggtcatcgtaaatgatcagcgcatcttcaccgcggtcacggaagtattcgcccattgcgcaaccggcatacggtgccaggtattgcagtgcagcggattcagacgcggttgctaccacaacgatggtgttagccagtgcgccgtgctcttccagtttacgtaccacgttagaaatggtggacgctttctggccgatagcgacatagatacatttgataccggaatcgcgctggttgatgatggcatcgatagccagtgcggttttacctgtctgacggtcaccgatgatcaattcacgctgaccacgaccgattgggatcatggagtcaacggctttataaccggtctgtaccggctgatctacggactgacgttcgataacgcccggagcgattgcttctacagcagagaagccgtcgtgatccagcggacctttaccgtcgattggtgcacccagagtgttaaccacacggcccagcaggccacggccaaccggaacttccaggatacggccagtacacttaactttcatgccttcggcaaggtcagcgtacggacccataacaaccgcacctacagagtcgcgctcgaggttcagtgcgatagcgtaacggttacccggcagggagatcatttcaccctgcatacaatcggccaggccgtgaatgcggataacaccgtcacttacagaaacaatagtaccttcgttgtgagcttcactcacaacattgaactgagcaatgcgctgcttgatcagttcgctgatttcggtggaattcagttgcatgctccagtccccttaagactgcaagacgtctgcaaggcgctcaagacgaccgcgtacgctgccatcaatgaccatatcacccgctcggatgataacgcctgccattacagacttatcgattttgcaattcagcttaactttgcgactcagacgtttttccatcgcagcagaaattttcgcgagctgttgttcactcagtgcggcagcggaaatgacgtctacctcagcggtagcctcactcacggcacgcaggtgaataaactgctccagaacatccgggagcgcgttaagacgaccattttcagccataacccgaatcaggttctgaccgttttcgtccagttgctcaccacaaactgcgataaagctctcggcgagcgtttctggcgcaagcgcgccagagagaagctctgccatttgttcgtttttggttacctcggcggcaaacgccagcatgtcctgccagcgttctacactttggtgttcgacggcaaagtcaaaagctgctttggcgtaggggcgagctaccgtaataaattcagacatcagcccctccctccttacagttcagcgacaagtttatccacgatgtcgctgttagcagcttcatccacggaacgttcgatgatcttctcggcgccagcaacagccaggatagcaacttgcttacgcagctcttcacgggcacgtttacgctcggcttcaatttccgcctgcgcctgggccacgattttagtacgttcctgttctgcctcagctttcgcttcgtccagaatctggctgcggcgtttgttcgcctgctcgatgattacctgggcttccgctttcgcttttttcagctggtcggtcgcgctggcctttgcaaggtcaaggtccttatgtgctcgttctgcggaagcaaggccgtcagcaatttctttttgacgtttttcgatggctgccattaatggcggccatacgtacttcatgcagaacagaacgaacaggacaaacgcgatggcctggccgaggattgttgcgttaagattcacagcacaatgcctctatttagttaacgttctgatattgctctttaaataaaagcaacgcttattacgcgacagcgaacatcacgtacagacccagacctacagcgatcatcgggatagcatccaccagacccataacgataaagaactgagtacgcagcagaggaatcagatcaggttgacgcgctgcgccttccaggaatttacccccgaggatgccgataccgatcgcagcaccgattgccgccagacccatcatcacagcggcagccatgtacagcagatccatattcaggttttccatgacagtctccagtttgtttcagttaaaacgtagtagtgttggtaaattaatgttcttcagacgccatgctcagatagacgatcgtcagaaccatgaagatgaaggcttgcagcgtaatgatcaggatgtggaaaatggcccacggcacattcaggatccactgactccaccacggcaacagaccagcaatcagaatgaaaatcagctcaccggcatacatgttaccgaacagtcgcaaaccgagactaactggtttggacagcaggcttaccccttcaaggattaagttgacaggaatgaacgcccagtgattgaacggctgcagcgtcaactctttcgtgaagccgccgatgcctttcattttgatgctgtagaacagaatcaggataaatacgcccagtgccatagacagcgttacgttcacgtccgcagacggaaccacacgcagtgcaggcagacccagtacatgttcagcaatgtacggcagcaggtcgataggcagtaaatccatcaggttcatcaggaatacccagacgaagatcgtcagggccagcggagcaatcagcttgcttttgccatggtacatgtctttcacgctaccattaacaaagccgatcaccagctcaatcgcggtctgaaacttacctggcacaccgctggtcgcctttttggctacgctacggaataaaaccaggaacaacagacccagcaccacgctgaagaacatggagtcaatattgattgtccagaaggtggctggggggttttgtggatccaccaggctgaatgtacgcaggtccagctgaaggttattcaggtggtgtcctatgtaatcctgcggcgtcatattttcactagccatgatgccttttaccctttgttgttaattacagccggtgccagtatctgaaccaccagcaccaaaacccacgtaacgatcagcggcaagaataccgcctttaaaaccgccaacgccaccaccagtaacaccaacatcgccagaactttgaaagcttcgccaaatgcgaatgtccaggccacccggcctttcgctggtgtatgcgcctggtgacgccaggcaaatatcataaacaaaacgttaggcagaaagactgccaggcccccgcttattgcagagacgccccagaaggggtctttgaggctgaacagcaatccacttgctatcaccaccagtaactgaacgagcagaagcttccgagcaacgtttcgactcacgaggctcacagacatcacgtttttcactcctgctcccttcgaggtatgccgcgtgtcgtataaaactttctttaaggcttagagtcaagcatcaaaaagcggtcaaattatacggtgcgcccccgtgatttcaaacaataagtagccaaaaggtgaataaatgtttaaatatttttccagtgcatacaattgcgacttttctgctaaccctgttcgatcatgaaaaactgtaaataacgcgtaaacactggtgataaagcgtgcttcagatcacatattgcgcatgttcgcgcacagcatatttatttacttggcaaatgatgcctttgcaagtttatgatatttcagtctaaaaacagatactgttttaataaatgacatttacacaacaaaaaccacccattgacatttttaataatgttttaacagccaatgatggttcttagcgccgatttttagcagactgatattttcactaatgacttattttctgcttaccaaaaaaagccacgttatcttgttgatgcaaaagagtgaacgtggcgttaaatgtaaccagttatatcagtagaaaacctggttgttgttaacagtctaaccggtcaattttttatgatttttttgataaaaattaaattttatttgctttaatcaccaccagatgacgttcgccatccagggctggaacctgaagtttaaccacactttcgacctgatattcttcgggcaacaaagcgatttcatcttccggcatttgccctttcagcgcgtagaaacggccttgctcaccaggaagatggtggcaccagctcaccatatcgttcagagaggcaaaagcgcggctaattacgccatcaaatggcggctcactaggaaactcttctaccctgctctgtactggttcaatattctccagtttaagctcatgttgcacctgacgaaggaaacgcacgcgtttaccaaggctatccaacagagtgaaatgggcttcaggacgcacgatagagagtggaatgcctggcagtcctggtccggtgccgacatcgataaaccgttcaccttgcagatacggtgccaccacaatgctatcgagaatatggcgtaccagcatctcattaggatcgcggacgctagtcaggttgtacgctttgttccatttatgcagcatattcacgtaggcaataagctggtttttctggtgatcggtaaggctaatacctgcgtctttcagcagtaaggagagtttgttgagcacggtgattacctgttcttgatgcgttgcctggtaagcgggtgcttaccaggcatttttaatgcgttatgcgctacgacgcagcataccctgttttttcagccacaccagcagaatggagatggccgcaggcgtgacgccagaaatacggctagcttggccgatagaggctggtttgtgatcgttaagtttggcgatcacttcgttagaaagaccggatacctggcggtaatccagtgtcgcgggtagcagggtgttctcgttacgcagctgcttttcgatctcatcttgctggcgcgcgatataaccttcgtatttaacctgaatctcaacctgttccgccgcctgttcgtctgtcaacgcaggggcaaacggcgtcagcgtggttaatttttcataagtcatttccggacgacgcagcagatcttcaccactggcttcacgggaaagcggcgcagtcaggtgagcattcacttcggctgcagcttccgcgctcggggttacccaggtgcttttcagacgctgacgctcacgctcgatattctcaagtttctcgttaaagcgcgcccaacgttcgtcatccaccaggcccagttcacgaccgatttcagtcaaacgcagatccgcattatcttcgcgtagcatcagacgatattctgcgcggctagtaaacatacgatacggttctttggttcctaaagtgcacaggtcatcaactagtacgccgagatacgcctgagaacgtgccggagcccaaccttctttgtcagcagacagacgggcagcgttaagaccggccagcaaaccttgcgcagcggcttcttcgtaaccggtagtgccgttaatctgaccagcaaagaacagcccctggataaacttgctctccagcgtcggtttcaggtcgcgaggatcgaagaagtcatactcaatggcataacccggacgcacgatcttcgcgttttccatcccctgcatagagcggacgatttgcatctgcacatcgaacggcaggctggtggagataccgttcggataaatttcattagaggtcagtccttccggttcaaggaagatctgatgctgatttctgtcggcgaagcgcatgactttgtcttcgatgctcgggcagtagcgtgggccgacaccttcgatcacccctgcgtacattgggctacgatcgaggttactgcggatcacatcatgggttttctcgttggtatgagtgatataacacggcacctgctggggatgctgggacgcattgcccataaagctgaataccggcattgggttatcgccatgctgttgcgccagtacgctaaagtcgatggttcgagcatcaatacgcggtggtgtcccggttttcagacgaccaacgcgcagcggcagttcacgcaaacggcgagaaagcggaatggacggcggatcaccagcacggccaccgctgtaattatccagaccgatatgaattttaccgtcgaggaacgtcccaacggtgagcacgacggctttggcacggaacttcagtcccatttgggtaacagcaccgaccacgcgatcgttttcgacaataagatcttcaaccgcctgctggaagatcatcaggttcggttggttctccagcgccgtacgtaccgcctgacggtagagcacacgatccgcctgagctcgggtagcgcgaaccgccggtcctttgcttgcgtttagtatcctaaactggatacccgcctgatcgatcgctttcgccatcagaccgccgagtgcatccacttcttttaccagatgtcccttcccaataccgccgatcgccgggttgcagctcatctgccccagagtgtcgatattgtgtgtcaaaagcagagtctgttgacccatacgcgccgcggccatcgcggcctcggtgcctgcatgacccccgccaatgatgatgacgtcaaaaggatccggataaaacatggtgattgcctcgcataacgcggtatgaaaatggattgaagcccgggccgtggattctactcaactttgtcggcttgagaaagacctgggatcctgggtattaaaaagaagatctatttatttagagatctgttctattgtgatctcttattaggatcgcactgccctgtggataacaaggatccggcttttaagatcaacaacctggaaaggatcattaactgtgaatgatcggtgatcctggaccgtataagctgggatcagaatgaggggttatacacaactcaaaaactgaacaacagttgttctttggataactaccggttgatccaagcttcctgacagagttatccacagtagatcgcacgatctgtatacttatttgagtaaattaacccagcttcccagccattcttctgccggatcttccggaatgtcgtgatcaagaatgttgatcttcagtgtttcgcctgtctgttttgcaccggaatttttgagttctgcctcgagtttatcgatagccccacaaaaggtgtcatattcacgactgccaataccgattgcgccaaagcggactgcagaaagatcgggcttctgttcctgcaatgcttcatagaaaggagaaaggttgtccggaatatctccggcaccgtgggtggagctgataaccagccagatcccactggcaggtaaatcttctaacagcggaccgtgcagcgtttcggtggtaaaacccgcctcttccagcttttcagccaggtgttctgctacatattcggcaccgccgagggtgctgccgctgataagagtgatatctgccataaaccgccacctttattaagagtggcgtattgtacgctgtgaacgcgttgggatctacctgtggaaaagtatgggattaaaaaagccgatcagggcttgatggtacgcatgatcgggttttgcaggacgatcaatgtctcggtggactgaatttcatcaattgtttggatcttgttgataagtacatgctggagagcgtcgatgctacggcacatcacttttataaagatgctgtagtggccggttgtgtaataggcttcagtgacttcatcaaggctttccagctttgccagcgcggaagggtagtctttggcgctctttaatataatgccgataaagcagcctacgtcataaccgagctgcttcgggctgacatcaatacgcgccccggtaatgatccccgcctgcttcattttctctactcgaacgtgaatcgtccccggactgacgccaaattgtttcgccagttcggcgtaagcggtgcgcgcattgcccattaatgcttccaggatgccacggtccagattgtcgatcagataattttccataggattttcttatgcggattgatgattcattctattttagccttcttttttaatgaatcaaaagtgagttaggctttttattgaatgattattgcatgtgtgtcggtttttgttgcttaatcataagcaacaggacgcaggagtataaaaaatgaaaaccgcttacattgccaaacaacgtcaaattagcttcgtgaaatctcacttttctcgtcaactggaagaacgtctggggctgatcgaagtccaggcgccgattcttagccgtgtgggggatggcacgcaggataacttgagcggctgtgaaaaagcggtgcaggtaaaagtgaaagctctgcctgatgcccagttcgaagtggttcatagtctggcgaagtggaaacgtcagaccttagggcaacacgacttcagcgcgggcgaagggctgtacacgcacatgaaagcccttcgccccgatgaagaccgtctttctccgttgcacagcgtctatgttgaccagtgggactgggaacgcgtaatgggcgacggtgagcgtcaattcagcactctgaaaagcacggtagaggcgatctgggcgggaattaaagcaaccgaagctgcggttagcgaagagtttggcctggcaccgttcctgccggatcagatccacttcgtacacagccaggagttactgtctcgttatccggatcttgatgccaaagggcgtgagcgggcgatagcgaaagatcttggcgcggtattccttgtcgggattggcggcaagctgagcgatggtcatcgccacgacgtgcgcgcaccggattatgatgactggagcaccccgagtgagctgggccatgcgggtctgaacggcgatattctggtgtggaacccggtactggaagatgcgtttgagctttcctccatggggatccgtgtagatgccgacacgctgaagcatcaactggcgctgaccggtgacgaagatcgcctggagctggagtggcatcaggcgctgctgcgcggtgaaatgccgcagaccatcggcggcggtatcggccagtctcgtttgactatgctgctgctgcaactgccgcatatcggccaggttcagtgtggagtatggccagctgctgttcgcgagagcgtcccttctctgctgtaataatttatcgccgccagcgtctgagcaggcggcttcgcatcccggtatcaaagcgccagatatgatcgaaaatgcgcatgatgccgggtttgccgtgtgcgctcatcgccacggcatgaaagcgatgctgatgtacccgctgcagctctttcactttactcgtcacgtcgtcaggcaaccgctgagcgataaaatcagaaatcaccaccgcatcggcatcaaaccattccctgctttgcaagcgttccataatggcgcgaaaacaactggcaagatcggtgccgccacgaaactgctggcttaaaaaacggattgcttgttcgatgccttgtgggccactaagctcataacggacgatctcggtggaaaatagcataatatagcagcgccggttttctgcgagagcaatgcgcatcaaggccaggcagaacgctttcgcacactgttcattaaagccgcccatactgccggaagtatccacacagacaataaacggcccgcgcggctgttcatcgtaatctttatgtaccaccggacgttcgatcactttttcacgccagctctcaccgtgcaggcgataggtgagcaactgtttttccaccagccgacggtaaaactcatactccagttccgttatccctagtgtcgccagttctggcggcaggagacgtaaaatatcatcgctttgttgcagaccatcaacctgctcaggaaccgtcgccggttcgcgcaccatggtgcggaaggtttccatctgcgcatcgttgcgcggtatacttttggcttcccgagaacgccccagctgctctgccaggcgtttcagttccggctgttcgttaagaaattcaccgtatttcacaatcaactgatagtcgccacgtttaagctgaccggcgctcatatcccacagacgaccagctgcagtattgttatctgcgagaatcggttcaagttgtccgctcagcgtcatgcgttcctgaacttcactcaacagttgttcgcgttcttcttctaatagctgttgatttaacgtcgttgcttgcacgatcagacttaaacgccaacgctggagaaaaagcgtgtgtaacgcactagtgatcgtgctgttagcatcaaccaactgtcgggcttgttctgcccatggagaattcagacgatgcagtaagtccaggatctgtggtagctgcacaataaactgtggcgtggagaggagctggctttgctgatagcacatcacctcttcggtgagttccggcgggactcgggcatctttcagccgactgcgcagcgcttcacgccagcggggaacatcatcagtgattgccgccttcaggcgtgggaatttttcaaagaagaccgccagctgcggactggccagcagtgcgatgatcatctcttcgatcaatccctcttcgctgacggccagcatcacattaagcgtatccagcgttagcattgttgtgcctggcgaatctgtgcaccgacatcctgtaggctggcttcaatgcgacctaaccagtcgccagggataaacagacatttttgctgttcgctgaataaagcgtgttgcttgcgccagtcgctttcaagctcttccagttgttgttttatttcaccaggcagaccttcagcgctactaccgggaagtgccagcgtactgccttgtaaacttacatcgcgaacgacaagatgttgggcgctatcaacttccagattcagtttctgggcaaagccgataccgttcagtttaccgcgaatttcaccacctttgctcagccactgttccagcgcgctacgctcaaaggagatatgaaccacttccatatcatgcagttttaacggtttttgcagcagtagagtcagagtggaagcagtaacgttaacaggaagttgatactgctgacgacggctgaaaatgccgcccagacgaattaccgttaaggctgttttatcgctttgttgctgctggagttgcaggtgacgttgcacaatcgcgccaaggcgagtcaacatcccttgctgttgccaggcgtgaccggtcatcaatacatcaatttgttgttgtatcaaattcaggctttgcgcgtcataccacaggcaatctttcagcaaaatgagatctaccggggcaacagcactgcgaccgctaaaaaaggcgctggcctgcaataatcggatcgcttttttccagcgacgatcgctgacataaggcgcatccggtaatttatccagttgctggcgcagcataaaaatcagctcaaatacatgatcgggcagcgtaatttcaccaatctctttctgccagcgttcatattcttcatctgtgacctgcaaggcatcaggaaccggattgtcgttttcatcctgttgactggtcagcatggagcggaaattcgctttatcctgcactttatctaaccacagacgaatcagcatgcggtcatataacgcttccagactgctgtctgcttccggcagctcgttggaggccgccaccagcagacgcatcgggattttttctacgtgtgcaccgttgcggaactggcgctcgttaatggcggtgagcaaggtattaagaattgccgggcccgctttccagatctcatccagaaagacaatttctgcttccggcaggtaaccgctggttaaacgttcatagcgcccttcatcttttagcgcctgaatagaaaggggaccaaaaacttcttccggcgtggagaagcgggtcatcagatattcaaacgcgcgggcattctgaaaggcgaattttaagcgccgggcgatcaaacttttggcaatacctggcgggccaaggaggaacacactttcaccacttaatgccgctaataaacacaagcggatggcgtggctacgttcataaagccccttttccaagctactgctcaggcgggaaattctttccgctaataaatgagggtgagccataatgaagtggcgtcctttcgtcaaaagttctgcgtaaattgcgagtatagacgtttcttgctggtggctaaaatagtctcaaagggggggtatttttctttgagccaggttaatgtggccgcatttaggagtacgattttgccgttaatcgtgcatactgtgcgcttttttgtgggccaagggactaagcacacatttcatatttcaacgaaagactagtctatgagcactgataataagcaaagtttgcccgcgattaccctcgcggcgattggagttgtctacggcgatattggtaccagcccgttatatacacttcgtgaatgtttgtccggccagtttggttttggcgttgaacgcgatgccgtgtttggctttttaagcctgatcttctggctgctaatctttgtggtttccattaaatatctcaccttcgtgatgcgggcagataacgccggtgagggggggatcctgacgttgatgagccttgccgggcgtaatacgagcgcgcgaaccacaagtatgctggtgattatggggctaatcggcggcagctttttctatggtgaagtcgtcataacacccgctattagcgtgatgagtgccattgaaggtctggaaatcgtcgccccgcagctggatacctggatagttcccctcagtattatcgttctcactttattatttatgattcaaaaacatggcacggctatggtcggtaagctgtttgcgccgatcatgctgacctggtttttgattctggcaggactggggttacgtagcattattgctaacccggaagtgctgcatgcgctgaatccaatgtgggcggtgcatttcttccttgaatacaaaacggtttcttttattgcattaggggcagtggtgttgagcattacgggggtcgaggcgctgtatgctgatatggggcactttggtaagttccctattcgcctggcgtggttcaccgtcgtattaccttccttgacccttaattacttcggtcagggagcgctgttgttaaagaacccggaagcgattaagaacccgttcttcctgttggcaccggactgggcgctgatcccgctgctgatcatcgccgcactggcgacggtaattgccagccaggcggttatctctggcgtcttcagtttgacgcgtcaggcggtacgtctgggatatttgagcccgatgcgcattattcacacctccgaaatggagagtgggcaaatctatattccgtttgtgaactggatgctctatgtcgcggtcgtgattgtgattgtcagctttgagcactccagcaacctggcggcggcgtacgggattgcggtgaccggaaccatggtgctgacgtctattctcagcactaccgtggcacgtcagaactggcactggaataagtattttgttgcgctgatcctgattgctttcctttgtgtcgatattccattgttcaccgctaacctcgataaactgctctccggcggctggttgccattgagcctcggtactgtgatgtttatcgtgatgaccacctggaagagcgagcgtttccgcttgctgcggcggatgcatgaacatggtaactctctggaagcgatgattgctagcctggagaaaagtccgcctgttcgcgtgcccgggaccgcggtgtatatgagccgtgcaatcaacgtcattccctttgcgctgatgcataaccttaaacataacaaggtattgcatgagcgggtgattctgttaactctgcgcaccgaagacgctccatatgtccataacgtccgtcgggtacagattgaacaactgagccccactttctggcgcgtggtggcaagttatggttggcgagaaacgccaaacgtagaagaagttttccaccgctgcggtctggaaggattaagttgccggatgatggaaacctccttctttatgagccatgagagcttgatcctcggcaaacgcccgtggtatttgcgtctgcgcggcaagctgtacttgctgctgcaacgtaatgcgctgcgtgcaccagatcaatttgaaatcccgccaaacagggttatcgaactgggtactcaggtcgaaatctaacgccagacgcctcctttcttcataagggggcgtttttgttttcatggttaatcaccatgtaaaacgtttcgaggttgatcacatttccgtaacgtcacgatggttttcccaactcagtcaggattaaactgtgggtcagcgaaacgtttcgctgatggagaaaaaaatgaaaaaaggcaccgttcttaattctgatattagtagcgtgatctcccgtctgggacataccgatacgctggtggtgtgtgatgctggtttacccatccccaaaagtacaacgcgtatcgatatggcattaacccagggtgtaccttcttttatgcaggtgctgggcgtcgtcacaaatgaaatgcaggtcgaggcggccattatcgcggaagagatcaaacaccataatccgcaactccacgaaacgttgctcactcaccttgagcagctgcaaaaacaccagggaaataccattgaaattcgttacaccacgcatgaacaattcaaacaacaaaccgcagaaagtcaggcggtaattcgcagcggagaatgttctccgtatgcgaatatcattctctgtgctggcgtgacgttctgaggccgtcatggaagcattacttcagcttaaaggcatcgataaagccttcccgggcgtaaaagccctcagcggcgcagcgttaaatgtctatccgggccgcgtgatggcgctggtgggcgaaaacggcgcgggtaaatccaccatgatgaaagtgcttactggcatctatactcgcgatgccggtacgcttttatggctggggaaagaaacgacatttaccgggccaaaatcttcccaggaagccgggattgggattatccatcaggaactgaacctgatcccgcagttgaccattgccgaaaacattttcctcggtcgtgagtttgttaatcgctttggcaaaattgactggaaaaccatgtatgccgaagcggataaattgctggctaaacttaacctgcgctttaaaagcgacaagctggtgggcgatctttccatcggtgaccagcaaatggttgaaatcgccaaagtgctgagctttgagagcaaagtcatcattatggatgaaccgaccgatgcgctgaccgataccgaaaccgaatccctgttccgcgtcatccgcgagctgaaaagccaaggccgcggtattgtctatatctcccaccgcatgaaagaaatcttcgagatttgcgatgacgttaccgtttttcgtgatgggcaatttattgctgagcgcgaagtggcaagtctgaccgaagatagcctgattgagatgatggtgggtcgcaagctggaagatcaatatccgcacctggacaaagcgccgggagatatccgcctgaaagtcgataatctctgcggacctggcgttaacgatgtctcttttactttacgcaaaggcgaaattcttggcgtctctggtttgatgggcgcaggtcgtaccgaactgatgaaagtgctctacggcgcactaccgcgcaccagcggttacgtcaccctggatgggcatgaagtcgttacccgtagtccgcaggatggcctggcaaacggcattgtgtatatctccgaagaccgtaaacgtgacggtttagtgttgggcatgagtgtaaaagagaacatgagcctgacagcgctgcgctacttcagccgcgctggcggcagtttgaagcatgccgatgaacagcaggctgtgagtgatttcattcgtctgtttaatgtgaaaactccgagcatggaacaggcaattggtctgctttccggtggcaatcagcaaaaagtggcgattgcccgcggtctgatgacacgccccaaagtgttgatccttgatgaacctacccgtggcgtagatgtcggcgcgaaaaaagagatctatcaactgattaaccagttcaaagccgatggcttgagcatcattctggtgagtagcgagatgccagaagtattaggcatgagcgatcgcatcatcgtcatgcatgaagggcatctcagcggggaatttactcgtgagcaggccacccaggaagtgttaatggctgccgctgtgggcaagcttaatcgcgtgaatcaggagtaaaaaaatgacaacccagactgtctctggtcgccgttatttcacgaaagcgtggctgatggagcagaaaagccttatcgctctgctggtgctgatcgcgattgtcagcacgttaagcccgaactttttcaccatcaataacttattcaatattctccagcaaaccagtgtgaacgccattatggcggtcgggatgacgctggtgatcctgacgagcggcatcgacttaagcgtaggttctctgttggcgctgaccggcgcagttgctgcatctatcgtcggcattgaagtcaatgcgctggtggctgtcgctgctgctctcgcgttaggtgccgcaattggtgcggtaaccggggtgattgtagcgaaaggtcgcgtccaggcgtttatcgctacgctggttatgatgcttttactgcgcggcgtgaccatggtttataccaacggtagcccagtgaataccggctttactgagaacgccgatctgtttggctggtttggtattggtcgtccgctgggcgtaccgacgccagtctggatcatggggattgtcttcctcgcggcctggtacatgctgcatcacacgcgtctggggcgttacatctacgcgctgggcggcaacgaagcggcaacgcgtctttctggtatcaacgtcaataaaatcaaaatcatcgtctattctctttgtggtctgctggcaagcctggccgggatcattgaagtggcgcgtctctcctccgcacaacccacggcggggactggctatgagctggatgctattgctgcggtggttctgggcggtacgagtctggcgggcggaaaaggtcgcattgttgggacgttgatcggcgcattaattcttggcttccttaataatggattgaatttgttaggtgtttcctcctattaccagatgatcgtcaaagcggtggtgattttgctggcggtgctggtagacaacaaaaagcagtaataacgactacaggacatcttgaatatgaacatgaaaaaactggctaccctggtttccgctgttgcgctaagcgccaccgtcagtgcgaatgcgatggcaaaagacaccatcgcgctggtggtctccacgcttaacaacccgttctttgtaagcctgaaagatggcgcgcagaaagaggcggataaacttggctataacctggtggtgctggactcccagaacaacccggcgaaagagctggcgaacgtgcaggacttaaccgttcgcggcacaaaaattctgctgattaacccgaccgactccgacgcagtgggtaatgctgtgaagatggctaaccaggcgaacatcccggttatcactcttgaccgccaggcaacgaaaggtgaagtggtgagccacattgcttctgataacgtactgggcggcaaaatcgctggtgattacatcgcgaagaaagcgggtgaaggtgccaaagttatcgagctgcaaggcattgctggtacatccgcagcccgtgaacgtggcgaaggcttccagcaggccgttgctgctcacaagtttaatgttcttgccagccagccagcagattttgatcgcattaaaggtttgaacgtaatgcagaacctgttgaccgctcatccggatgttcaggctgtattcgcgcagaatgatgaaatggcgctgggcgcgctgcgcgcactgcaaactgccggtaaaagcgatgtgatggtcgtcggatttgacggtacaccggatggcgaaaaagcggtgaatgatggcaaactagcagcgactatcgctcagctacccgatcagattggcgcgaaaggcgtcgaaaccgcagataaagtgctgaaaggcgagaaagttcaggctaagtatccggttgatctgaaactggttgttaagcagtaattttaatcaggttgtatgacctgatggtgacataaatacgtcatcgacagatgaacgtgtaatataaagaaaagcagggcacgcgccaccctaacacggtggcgcattttatggacatcccgaatatgcaaaacgcaggcagcctcgttgttcttggcagcattaatgctgaccacattcttaatcttcaatcttttcctactccaggcgaaaccgtaaccggtaaccactatcaggttgcatttggcggcaaaggcgcgaatcaggctgtggctgctgggcgtagcggtgcgaatatcgcgtttattgcctgtacgggtgatgacagcattggtgagagcgttcgccagcagctcgccactgataacattgatattactccggtcagcgtgatcaaaggcgaaagtacaggtgtggcgctgatttttgttaatggcgaaggtgagaatgtcatcggtattcatgccggcgctaatgctgccctttccccggcgctggtggaagcgcaacgtgagcgtattgccaacgcgagtgcattattaatgcagctggaaagtccactcgaaagtgtgatggcagcggcgaaaatcgcccatcaaaataagactatcgttgcgcttaacccggctccggctcgcgaacttcctgacgaactgctggcgctggtggacattattacgccaaacgaaacggaagcagaaaagctcaccggtattcgtgttgaaaatgatgaagatgcagcgaaggcggcgcaggtactgcatgaaaaaggtatccgtactgtactgattactttaggaagtcgtggtgtatgggctagcgtgaatggtgaaggtcagcgcgttcctggattccgggtgcaggctgtcgataccattgctgccggagatacctttaacggtgcgttaatcacggcattgctggaagaaaaaccattgccagaggcgattcgttttgcccatgctgccgctgcgattgccgtaacacgtaaaggcgcacaaccttccgtaccgtggcgtgaagagatcgacgcatttttagacaggcagaggtgacgcttggctacaatgaaagatgttgcccgcctggcgggcgtttctaccagtacagtttctcacgttatcaataaagatcgcttcgtcagtgaagcgattaccgccaaagttgaagcggcgattaaagaactcaattacgcgccaagtgctctggcgcgtagcctcaaactcaatcaaacacataccattggcatgttgatcactgccagtaccaatcctttctatagtgaactggtgcgtggcgttgaacgcagctgcttcgaacgcggttatagtctcgtcctttgcaataccgaaggcgatgaacagcggatgaatcgcaatctggaaacgctgatgcaaaaacgcgttgatggcttgctgttactgtgcaccgaaacgcatcaacctagccgtgaaatcatgcaacgttatccgacagtgcctactgtgatgatggactgggctccgttcgatggcgacagcgatcttattcaggataacagcttgctgggcggagacttagcaacgcaatatctgatcgataaaggtcatacccgtatcgcctgtattaccggcccgctggataaaactccggcgcgcctgcggttggaaggttatcgggcggcgatgaaacgtgcgggtctcaacattcctgatggctatgaagtcactggtgattttgaatttaacggcgggtttgacgctatgcgccaactgctaagtcatccgctgcgtcctcaggccgtctttaccggaaatgacgctatggctgttggcgtttaccaggcgttatatcaggcagagttacaggttccgcaggatatcgcggtgattggctatgacgatatcgaactggcaagctttatgacgccaccattaaccactatccaccaaccgaaagatgaactgggggagctggcgattgatgtactcatccatcggataacccagccgacccttcagcaacaacgattacaacttactccgattctgatggaacgcggtagcgcttaattactcgctttcacttggaacgcggttcggcttagatttacgctgtcttttgatcaaattattaccatcggttgttttcagaagcatgaacattgctgcactagcaacagtaataatgcccattgtgataaacgtatagtggaattgttcgacagtcgttgtgccttccattccttcataaacgcgaaggacggccgcacttacagcaacgcctaaactaatgctcagttgctgcgtgaccgccagaacactgttaccgctgctggcattgtcatcggtcagatcggcaagtgtgatggtattcatcgcggtaaactgcgtgctcatagccatccctaatataaacaacggcaagatcagcatccatatagccattgctggactttgcaaagagaactgagcgatcattagcccaataatcaccgtgatccccactaacgtatggcgatagcccagacgacgtaagacttgggtaaccatgctttttgcaataatggaacctaacgctgtcggtgccatcatacagccagcaataaacgcctgataaccaaatcctacctgtaacatcaatggcataaggaacggtacacagccggtccccagacgggttgcaatattgcctacgataccgatgctgaaagtgcgggttttaaataaatctaaactaattaatgggtttggcgtgcgtcgtgcatggagaatatagagaagcagtaacccgatgctggtgacaattaccgtcaaggcaatccagctggcgacaatcttttccccgaatagctctattccgctactgaagagaacaaggctgaggccaaacagcaaaaagccagtgatatcgaatctgcgtcgtgcggtggtgaaattgggcatatgtttgcgcgcgtaaagaaggcccgcaatacctatggggatattgattaaaaatatccagtgccaggttgcccaggtgaccagcacgccgccaagaacggggcctaaaattggccccaccagacccggcatggcgacaaaattcaatactggaagaagttcattacgaggataagcgcgcagtaaggccagccgagcaacaggcatcatcattgcgccgcctatcccctgaataacccggaagacaaccagctgtggtaggctattagaaagtgcgcaggccagagaacccaatgtgaacagactcacggcaagggtaaaaatgcgacgcgtaccgaagcgatcggctagccatccgcttaccggaataagcatcgccaccgtcagcgtataactgatgatggcactttgcatcgcgagaggagaacgattaaggctatgagcgattgcgggtaaggcggtattaagaatagtggcatcaagtgcctgcatgaagaaggccatcgccgcgatccacggcaaacccgccatactgcgcttctttttatcgctcattcaatgtcctgttatcgggttatcacttatcaggactgcgtagcagcgcctgacaagctttaaatgccgcgtcgccatcgctttggataatcgcatcgacaatcgcctgatgcagatccagctttatcactgtgtcgctggtaatactcgtgaagtaagtgtgataaacgctatggaataggctggcgaaactggtcaaaaacggattggcgctcatttcatagatatgctcatgccaggccatatcgacttcgatccagcgttcacggcgaaagttctcttttaatgccgccatttcggccattaacgtattgagatgcgctttctgttccgcggtgccaaccgttgctgccagtaggcaggcttgcggctccagacagatacgcataaccagaaagtgatcgatgacctgatgaaagttctcttctgtcatccaccaggtaagcaattcctgatcaagaaaattccagttgctttgtggcatgacccgagtaccaattcgcggtcgcggtaaaaccatcccttttgccgttaacgttttgaccgcttcgcgtaccgctgtacgactcactccaaattgctcgcccagctcaatctcaccgggcaaaatggtgccgggttcatattcaccttttaagatccgttgcgccagcttctcagccagaacatagctaaggtttttctgtgcagctaactgttgtgcgcttaaaggcattacttatcttcctttttctttttattcctccttagtatgccaccaggaagtgtgattacggttgcaaaaacggcaaattgcttgttttatggcacattaacggggcttttgctgaaaaaatgcgcggtcagaaaattattttaaatttcctcttgtcaggccggaataactccctataatgcgccaccactgacacggaacaacggcaaacacgccgccgggtcagcggggttctcctgagaactccggcagagaaagcaaaaataaatgcttgactctgtagcgggaaggcgtattatgcacaccccgcgccgctgagaaaaagcgaagcggcactgctctttaacaatttatcagacaatctgtgtgggcactcgaagatacggattcttaacgtcgcaagacgaaaaatgaataccaagtctcaagagtgaacacgtaattcattacgaagtttaattctttgagcatcaaacttttaaattgaagagtttgatcatggctcagattgaacgctggcggcaggcctaacacatgcaagtcgaacggtaacaggaaacagcttgctgtttcgctgacgagtggcggacgggtgagtaatgtctgggaaactgcctgatggagggggataactactggaaacggtagctaataccgcataacgtcgcaagaccaaagagggggaccttcgggcctcttgccatcagatgtgcccagatgggattagctagtaggtggggtaacggctcacctaggcgacgatccctagctggtctgagaggatgaccagccacactggaactgagacacggtccagactcctacgggaggcagcagtggggaatattgcacaatgggcgcaagcctgatgcagccatgccgcgtgtatgaagaaggccttcgggttgtaaagtactttcagcggggaggaagggagtaaagttaatacctttgctcattaacgttacccgcagaagaagcatcggctaactccgtgccagcagccgcggtaatacggagggtgcaagcgttaatcggaattactgggcgtaaagcgcacgcaggcggtttgttaagtcagatgtgaaatccccgggctcaacctgggaactgcatctgatactggcaagcttgagtctcgtagaggggggtagaattccaggtgtagcggtgaaatgcgtagagatctggaggaataccggtggcgaaggcggccccctggacgaagactgacgctcaggtgcgaaagcgtggggagcaaacaggattagataccctggtagtccacgccgtaaacgatgtcgacttggaggttgtgcccttgaggcgtggcttccggagctaacgcgttaagtcgaccgcctggggagtacggccgcaaggttaaaactcaaatgaattgacgggggcccgcacaagcggtggagcatgtggtttaattcgatgcaacgcgaagaaccttacctggtcttgacatccacggaagttttcagagatgagaatgtgccttcgggaaccgtgagacaggtgctgcatggctgtcgtcagctcgtgttgtgaaatgttgggttaagtcccgcaacgagcgcaacccttatcctttgttgccagcggtccggccgggaactcaaaggagactgccagtgataaactggaggaaggtggggatgacgtcaagtcatcatggcccttacgaccagggctacacacgtgctacaatggcgcatacaaagagaagcgacctcgcgagagcaagcggacctcataaagtgcgtcgtagtccggattggagtctgcaactcgactccatgaagtcggaatcgctagtaatcgtggatcagaatgccacggtgaatacgttcccgggccttgtacacaccgcccgtcacaccatgggagtgggttgcaaaagaagtaggtagcttaaccttcgggagggcgcttaccactttgtgattcatgactggggtgaagtcgtaacaaggtaaccgtaggggaacctgcggttggatcacctccttaccttaaagaagcgttctttgcagtgctcacacagattgtctgataggaagtgaaaagcaaggcgtcttgcgaagcagactgatacgtccccttcgtctagaggcccaggacaccgccctttcacggcggtaacaggggttcgaatcccctaggggacgccacttgctggtttgtgagtgaaagtcacctgccttaatatctcaaaactcatcttcgggtgatgtttgagatatttgctctttaaaaatctggatcaagctgaaaattgaaacactgaacaacgaaagttgttcgtgagtctctcaaattttcgcaacacgatgatgaatcgaaagaaacatcttcgggttgtgaggttaagcgactaagcgtacacggtggatgccctggcagtcagaggcgatgaaggacgtgctaatctgcgataagcgtcggtaaggtgatatgaaccgttataaccggcgatttccgaatggggaaacccagtgtgtttcgacacactatcattaactgaatccataggttaatgaggcgaaccgggggaactgaaacatctaagtaccccgaggaaaagaaatcaaccgagattcccccagtagcggcgagcgaacggggagcagcccagagcctgaatcagtatgtgtgttagtggaagcgtctggaaaggcgcgcgatacagggtgacagccccgtacacaaaaatgcacatattgtgagctcgatgagtagggcgggacacgtggtatcctgtctgaatatggggggaccatcctccaaggctaaatactcctgactgaccgatagtgaaccagtaccgtgagggaaaggcgaaaagaaccccggcgaggggagtgaaaaagaacctgaaaccgtgtacgtacaagcagtgggagcacgcttaggcgtgtgactgcgtaccttttgtataatgggtcagcgacttatattctgtagcaaggttaaccgaataggggagccgaagggaaaccgagtcttaactgggcgttaagttgcagggtatagacccgaaacccggtgatctagccatgggcaggttgaaggttgggtaacactaactggaggaccgaaccgactaatgttgaaaaattagcggatgacttgtggctgggggtgaaaggccaatcaaaccgggagatagctggttctccccgaaagctatttaggtagcgcctcgtgaattcatctccgggggtagagcactgtttcggcaagggggtcatcccgacttaccaacccgatgcaaactgcgaataccggagaatgttatcacgggagacacacggcgggtgctaacgtccgtcgtgaagagggaaacaacccagaccgccagctaaggtcccaaagtcatggttaagtgggaaacgatgtgggaaggcccagacagccaggatgttggcttagaagcagccatcatttaaagaaagcgtaatagctcactggtcgagtcggcctgcgcggaagatgtaacggggctaaaccatgcaccgaagctgcggcagcgacgcttatgcgttgttgggtaggggagcgttctgtaagcctgcgaaggtgtgctgtgaggcatgctggaggtatcagaagtgcgaatgctgacataagtaacgataaagcgggtgaaaagcccgctcgccggaagaccaagggttcctgtccaacgttaatcggggcagggtgagtcgacccctaaggcgaggccgaaaggcgtagtcgatgggaaacaggttaatattcctgtacttggtgttactgcgaaggggggacggagaaggctatgttggccgggcgacggttgtcccggtttaagcgtgtaggctggttttccaggcaaatccggaaaatcaaggctgaggcgtgatgacgaggcactacggtgctgaagcaacaaatgccctgcttccaggaaaagcctctaagcatcaggtaacatcaaatcgtaccccaaaccgacacaggtggtcaggtagagaataccaaggcgcttgagagaactcgggtgaaggaactaggcaaaatggtgccgtaacttcgggagaaggcacgctgatatgtaggtgaagcgacttgctcgtggagctgaaatcagtcgaagataccagctggctgcaactgtttattaaaaacacagcactgtgcaaacacgaaagtggacgtatacggtgtgacgcctgcccggtgccggaaggttaattgatggggtcagcgcaagcgaagctcttgatcgaagccccggtaaacggcggccgtaactataacggtcctaaggtagcgaaattccttgtcgggtaagttccgacctgcacgaatggcgtaatgatggccaggctgtctccacccgagactcagtgaaattgaactcgctgtgaagatgcagtgtacccgcggcaagacggaaagaccccgtgaacctttactatagcttgacactgaacattgagccttgatgtgtaggataggtgggaggctttgaagtgtggacgccagtctgcatggagccgaccttgaaataccaccctttaatgtttgatgttctaacgtggacccgtgatccgggttgcggacagtgtctggtgggtagtttgactggggcggtctcctcctaaagagtaacggaggagcacgaaggttggctaatcctggtcggacatcaggaggttagtgcaatggcataagccagcttgactgcgagcgtgacggcgcgagcaggtgcgaaagcaggtcatagtgatccggtggttctgaatggaagggccatcgctcaacggataaaaggtactccggggataacaggctgataccgcccaagagttcatatcgacggcggtgtttggcacctcgatgtcggctcatcacatcctggagctgaagtaggtcccaagggtatggctgttcgccatttaaagtggtacgcgagctgggtttagaacgtcgtgagacagttcggtccctatctgccgtgggcgctggagaactgaggggggctgctcctagtacgagaggaccggagtggacgcatcactggtgttcgggttgtcatgccaatggcactgcccggtagctaaatgcggaagagataagtgctgaaagcatctaagcacgaaacttgccccgagatgagttctccctgactccttgagagtcctgaaggaacgttgaagacgacgacgttgataggccgggtgtgtaagcgcagcgatgcgttgagctaaccggtactaatgaaccgtgaggcttaaccttacaacgccgaagatgttttggcggatgagagaagattttcagcctgatacagattaaatcagaacgcagaagcggtctgatgaaacagaatttgcctggcggccgtagcgcggtggtcccacctgaccccatgccgaactcagaagtgaaacgccgtagcgccgatggtagtgtggggtctccccatgcgagagtagggaactgccaggcatcaaattaagcagtaagccggtcataaaaccggtggttgtaaaagaattcggtggagcggtagttcagtcggttagaatacctgcctgtcacgcagggggtcgcgggttcgagtcccgtccgttccgccaccctaattaggggcgtagttcaattggtagagcaccggtctccaaaaccgggtgttgggagttcgagtctctccgcccctgccagaaatcatccttagcgaaagctaaggattttttttatctgaaataaccctctccgaagtaaatccttctaccggcatccttgccagccattcatattaatacacttcatccagcacgttaattttcaaaagatcgcgaatcaacgcatttttatcgctattttgcagccatatggcataaagcggccgactaagtgttgtgctatcgacaacggtatgcaggccgccttttttacgcgcccagctgacgggtagccaggtgcaaccattaagcatcgcaatctgttgctgtgccagttcagcagaactggttgtcagaatgggcacttcgtcagcaccgatcaaacctgcctcatgctgttgaaaatctggcccccactcaagtcgcagataattaagatctccctttagtttactaggggcactggtataaagcgctaaagtgaaatatcccagcaactgactactaaattcgtccattttgggcgcttcagtggtaataagaagatcaagctggcgttcatgcagctgttttaccagagactgccgttgggcaattcgcgcttcgaactgtaagcctgtatgggcatcctgattttgatacaagcgtcccagccactgattaagcatacattcccacaagctggcgctggcaccgatagaaaactcgttatgtcgactggtatgcgccacctccttacgggcggcctgccaggtgctcatgagcgtttctgcataaggcagtagtttttcaccggcagcggttaaacggatattgtttctgtggcgggtgaaaaggttcacacccagttgattttccagttgtctgattcgaaagctcactgcactctgggtcagatagaggctttcagccgctcgaccaaagtgacgcgttcggctaacttccaggaaagtttttaacaattccgtatccacagtgctctccgcaaaattatttgtcgttatgatttaaatgttttgttttacactctgtcaagcgtaactaatactccgcgccataactagctcggtcaaagaattaggagcgtgcaggatggcggaaagctttacgacgactaatcgatatttcgacaataaacattatccacgtggattctctcgtcatggtgatttcaccatcaaagaggcacaactgcttgagcgtcatggttatgccttcaatgagttggatcttggcaaacgcgagccggttaccgaggaagagaaactcttcgtagcagtatgccgtggcgaacgtgagccagtgacagaagcagaacgcgtgtggtccaagtatatgacgcgtattaagcgtccaaaacgttttcacaccctttccggcggtaaaccgcaggttgaaggtgctgaagactacaccgattctgacgattaataaaaagggcgaaatgccctttttttatgtcagtagtttctgcagatggatgagcaaacggtcaatcgctcgatagctaactgcctcctgcaaatgctgacgtgtgataatgtcagactgatcaatatcagcaatggttcgtgcaactttcaataaccgctgccaggcacgaatgcttaaccccagatggatcagtgttccttccaaccacatcgcatcttcgctctcaagtttgcagaattggcgtatttccggactatccagccaggcattcagtttattctgccgcttaaattggcgctctctggcggccattacgcgttgtttaacggtggcgctgctttctcccggcactaccgttttactcaaaatgccggggggtggtaatgggatctccagactgagatcgaagcggtcgagaaagggcccgctgagccggttgagataacgtaatgtctgttctggcgtgcagcggttatggtttccctgataatgtccggtagggctgggattcatcgccgcaacaagctggaaacgggctggataggttatttttgctcgtgtgcgactaagatggatctgcccggattcaatcggctctcgcaaggcatccagtgtacgccgttcaaattcaggtagctcatcaagaaaaagcacgccgttatgcgccaggctaatttcaccgggccctggaattgcgccaccgcctaccatcgcagttaagcttgcactgtgatgaggactgcggaacgggcgctgccgccattgtttttgtacactttcagcatttaccagacttaatatcgcagcactctccagtgcctcttcattgcttaaatctggcaacaggccattaatacggctggcgagcattgttttacctgttcccggcggcccaatcagtaaaaggttgtgcccgccagcagcggtaatttccagtcctcgctttccttgttcctgaccgataacatcactgagatcatgttgtagcgcccgggatactgcatcagttggtttcgggcgttcgagagcgtgcttaccttccagaaacgcacagacagcttgcagatgatcggctatcaggcatccttcaccgttaattagccccacttcatcttcgttatctttcgcgacgataatttttctgccgctcttaatagcttcagttgcactggagattgcgccgggaacgccacgcagagcgcctgtaagcgccagttctccgactaattcatattcatctaacttattggctgtaagctgttcactggccgccagcaacgcaatggcgataggtaaatcatatcgtcccccttcttttggcagatcagctggagccaggttgatggtgatttttttcgccggatattcatatccgctattgataatggcgctgcgcacgcgatcgcgagcttcttttaccgttgtttctggtaagcccaccatcgttaagccgggtagacctttactgatatgtacctcaacagtgatcgggggcgcatttactcccagggctgcgcgggtatgaacaatactcagactcataagccctccttgagtcaccattatgtgcataagatatcgctgctgtagcccgctaattcgtgaattttagtggctgattcctgtttatttgtgcaagtgaagttgagttgttctggcggtggaatgatgctcgcaaaaatgcagcggacaaaggatgaactacgaggaagggaacaacattcatactgaaattgaatttttttcactcactattttatttttaaaaaacaacaatttatattgaaattattaaacgcatcataaaaatcggccaaaaaatatcttgtactatttacaaaacctatggtaactctttaggcattccttcgaacaagatgcaagaaaagacaaaatgacagcccttctacgagtgattagcctggtcgtgattagcgtggtggtgattattatcccaccgtgcggggctgcacttggacgaggaaaggcttaaagatcaagccttaacgaactaagacccccgcaccgaaaggtccgggggttttttttgaccttaaaaacataaccgaggagcagacaatgaataacagcacaaaattctgtttctcaagattcaggacggggaactaactatgaatggcgcacagtgggtggtacatgcgttgcgggcacagggtgtgaacaccgttttcggttatccgggtggcgcaattatgccggtttacgatgcattgtatgacggcggcgtggagcacttgctatgccgacatgagcagggtgcggcaatggcggctatcggttatgctcgtgctaccggcaaaactggcgtatgtatcgccacgtctggtccgggcgcaaccaacctgataaccgggcttgcggacgcactgttagattccatccctgttgttgccatcaccggtcaagtgtccgcaccgtttatcggcactgacgcatttcaggaagtggatgtcctgggattgtcgttagcctgtaccaagcacagctttctggtgcagtcgctggaagagttgccgcgcatcatggctgaagcattcgacgttgcctgctcaggtcgtcctggtccggttctggtcgatatcccaaaagatatccagttagccagcggtgacctggaaccgtggttcaccaccgttgaaaacgaagtgactttcccacatgccgaagttgagcaagcgcgccagatgctggcaaaagcgcaaaaaccgatgctgtacgttggcggtggcgtgggtatggcgcaggcagttccggctttgcgtgaatttctcgctgccacaaaaatgcctgccacctgtacgctgaaagggctgggcgcagtagaagcagattatccgtactatctgggcatgctggggatgcacggcaccaaagcggcaaacttcgcggtgcaggagtgtgacctgctgatcgccgtgggcgcacgttttgatgaccgggtgaccggcaaactgaacaccttcgcgccacacgccagtgttatccatatggatatcgacccggcagaaatgaacaagctgcgtcaggcacatgtggcattacaaggtgatttaaatgctctgttaccagcattacagcagccgttaaatcaatgactggcagcaacactgcgcgcagctgcgtgatgaacattcctggcgttacgaccatcccggtgacgctatctacgcgccgttgttgttaaaacaactgtcggatcgtaaacctgcggattgcgtcgtgaccacagatgtggggcagcaccagatgtgggctgcgcagcacatcgcccacactcgcccggaaaatttcatcacctccagcggtttaggtaccatgggttttggtttaccggcggcggttggcgcacaagtcgcgcgaccgaacgataccgttgtctgtatctccggtgacggctctttcatgatgaatgtgcaagagctgggcaccgtaaaacgcaagcagttaccgttgaaaatcgtcttactcgataaccaacggttagggatggttcgacaatggcagcaactgttttttcaggaacgatacagcgaaaccacccttactgataaccccgatttcctcatgttagccagcgccttcggcatccatggccaacacatcacccggaaagaccaggttgaagcggcactcgacaccatgctgaacagtgatgggccatacctgcttcatgtctcaatcgacgaacttgagaacgtctggccgctggtgccgcctggcgccagtaattcagaaatgttggagaaattatcatgatgcaacatcaggtcaatgtaagcgctcgcttcaatccagaaaccttagaacgtgttttacgcgtggtgcgtcatcgtggtttccacgtctgcagtatgaatatggccgccgccagcgatgcacaaaatataaatatcgaattgaccgttgccagcccacggagcgtcgacttactgtttagtcagttaaataaactggtggacgtcgcacacgttgccatctgccagagcacaaccacaagtcaacaaatccgcgcctgagcgcaaaaggaatataaaaatgaccacgaagaaagctgattacatttggttcaatggggagatggttcgctgggaagacgcgaaggtgcatgtgatgagccacgcgctgcactatggcactagcgtttttgaaggcatccgttgctacgacagccacaaaggaccggttgtattccgccatcgtgagcatatgcagcgtctgcatgactccgccaaaatctatcgcttcccggttagccagagcattgatgagctgatggaagcttgtcgtgacgtgatccgcaaaaacaatctcaccagcgcctatatccgtccgctgatcttcgtcggtgatgttggcatgggagtaaacccgccagcgggatacagtaccgacgtgattatcgctgctttcccgtggggagcgtatctgggcgcagaagcgctggagcaggggatcgatgcgatggtttcctcctggaaccgcgcagcaccaaacaccatcccgacggcggcaaaagccggtggtaactacctctcttccctgctggtgggtagcgaagcgcgccgccacggttatcaggaaggtatcgcgctggatgtgaacggttatatctctgaaggcgcaggcgaaaacctgtttgaagtgaaagatggtgtgctgttcaccccaccgttcacctcctccgcgctgccgggtattacccgtgatgccatcatcaaactggcgaaagagctgggaattgaagtacgtgagcaggtgctgagccgcgaatccctgtacctggcggatgaagtgtttatgtccggtacggcggcagaaatcacgccagtgcgcagcgtagacggtattcaggttggcgaaggccgttgtggcccggttaccaaacgcattcagcaagccttcttcggcctcttcactggcgaaaccgaagataaatggggctggttagatcaagttaatcaataaatacaaaaaatgggacggcacgcaccgtcccatttacgagacagacactgggagtaaataaagtatgcctaagtaccgttccgccaccaccactcatggtcgtaatatggcgggtgctcgtgcgctgtggcgcgccaccggaatgaccgacgccgatttcggtaagccgattatcgcggttgtgaacagcttcacccaatttgtaccgggtcacgtccatctgcgcgatctcggtaaactggtcgccgaacaaattgaagcggctggcggcgttgccaaagagttcaacaccattgcggtggatgatgggattgccatgggccacggggggatgctttatagtctgccatctcgcgaactgatcgctgattccgttgagtatatggtcaacgcccactgcgccgacgccatggtctgcatctctaactgcgacaaaatcaccccggggatgctgatggcttccctgcgcctgaatattccggtgatctttgtttccggcggcccgatggaggccgggaaaaccaaactttccgatcagatcatcaagctcgatctggttgatgcgatgatccagggcgcagacccgaaagtatctgactcccagagcgatcaggttgaacgttccgcgtgtccgacctgcggttcctgctccgggatgtttaccgctaacagtatgaactgcctgaccgaagcgctgggcctgagccagccgggcaacggcagcctgctggcaacccacgccgaccgtaagcagctgttccttaatgctggtaaacgcattgttgaattgaccaaacgttattacgagcaaaacgacgaaagtgcactgccgcgtaatatcgccagtaaggcggcgtttgaaaacgccatgacgctggatatcgcgatgggtggaagcactaacaccgtacttcacctgctggcggcggcgcaggaagcggaaatcgacttcaccatgagtgatatcgataagctttcccgcaaggttccacagctgtgtaaagttgcgccgagcacccagaaataccatatggaagatgttcaccgtgctggtggtgttatcggtattctcggcgaactggatcgcgcggggttactgaaccgtgatgtgaaaaacgtacttggcctgacgttgccgcaaacgctggaacaatacgacgttatgctgacccaggatgacgcggtaaaaaatatgttccgcgcaggtcctgcaggcattcgtaccacacaggcattcagccaagattgccgttgggatacgctggacgacgatcgcgccaatggctgtatccgcagcctggaacacgcctacagcaaagacggcggcctggcggtgctctacggtaactttgcggaaaacggctgcatcgtgaaaacggcaggcgtcgatgacagcatcctcaaattcaccggcccggcgaaagtgtacgaaagccaggacgatgcggtagaagcgattctcggcggtaaagttgtcgccggagatgtggtagtaattcgctatgaaggcccgaaaggcggtccggggatgcaggaaatgctctacccaaccagcttcctgaaaagtatgggtctcggcaaagcctgtgcgctgatcaccgacggtcgtttctctggtggcacctctggtctttccatcggccacgtcagtccggaagcggcaagcggcggcagcattggcctgattgaagatggtgacctgatcgctatcgacatcccgaaccgtggcattcagttacaggtaagcgatgccgaactggcggcgcgtcgtgaagcgcaggacgctcgaggtgacaaagcctggacgccgaaaaatcgtgaacgtcaggtctcctttgccctgcgtgcttatgccagcctggcaaccagcgccgacaaaggcgcggtgcgcgataaaagcaaactggggggttaataatggctgacagccaacccctgtccggtgctccggaaggtgccgaatatttaagagcagtgctgcgcgcgccggtttacgaggcggcgcaggttacgccgctacaaaaaatggaaaaactgagcagccgtcttgataacgtcattctggtgaagcgcgaagatcgccagccagtgcacagctttaagctgcgcggcgcatacgccatgatggcgggcctgacggaagaacagaaagcgcacggcgtgatcactgcttctgcgggtaaccacgcgcagggcgtcgcgttttcttctgcgcggttaggcgtgaaggccctgatcgttatgccaaccgccaccgccgacatcaaagtcgacgcggtgcgcggcttcggcggcgaagtgctgctccacggcgcgaactttgatgaagcgaaagccaaagcgatcgaactgagtcagcagcaggggttcacctgggtgccgccgttcgaccatccgatggtgattgccgggcaaggcacgctggcgctggaactgctccagcaggacgcccatctcgaccgcgtatttgtgccagtcggcggcggcggtctggctgctggcgtggcggtgctgatcaaacaactgatgccgcaaatcaaagtgatcgccgtagaagcggaagactccgcctgcctgaaagcagcgctggatgcgggtcatccggttgatctgccgcgcgtagggctatttgctgaaggcgtagcggtaaaacgcatcggtgacgaaaccttccgtttatgccaggagtatctcgacgacatcatcaccgtcgatagcgatgcgatctgtgcggcgatgaaggatttattcgaagatgtgcgcgcggtggcggaaccctctggcgcgctggcgctggcgggaatgaaaaaatatatcgccctgcacaacattcgcggcgaacggctggcgcatattctttccggtgccaacgtgaacttccacggcctgcgctacgtcagtgaacgctgcgaactgggcgaacagcgtgaagcgttgttggcggtgaccattccggaagaaaaaggcagcttcctcaaattctgccaactgcttggcgggcgtagcgtcaccgagttcaactaccgttttgccgatgccaaaaacgcctgcatctttgtcggtgtgcgcctgagccgcggcctcgaagagcgcaaagaaattttgcagatgctcaacgacggcggctacagcgtggttgatctctccgacgacgaaatggcgaagctacacgtgcgctatatggtcggcggacgtccaagccatccgttgcaggaacgcctctacagcttcgaattcccggaaagtccgggcgcgctgctgcgcttcctcaacacgctgggtacgtactggaacatttctttgttccactatcgcagccatggcaccgactacgggcgcgtactggcggcgttcgaacttggcgaccatgaaccggatttcgaaacccggctgaatgagctgggctacgattgccacgacgaaaccaataacccggcgttcaggttctttttggcgggttaaggaaaaatgcctgatagcgcttcgcttatcaggcctacccgcgcgacaacgtcatttgtggttcggcaaaatcttccagaatgcctcaattagcggctcatgtagccgctttttctgcgcacacacgcccagctcaaacggcgttttctcatcgctgcgctctaaaatcatcacgcggttacgcaccggttcggggctgttttccagcaccacttccggcaacaatgccacgccacagccgagtgccaccatgcttaccatcgcttcatgcccgccaaccgtggcgtaaatcatcgggttactgattttattgcgtcgaaaccacagttcaatgcggcggcgtaccggcccctgatcggccataataaacggcaccgtactccagtccggcttctctacgctcacctgattacgcaccgggcagggcagcgcgggggcaatcagcactactgccagattctccagcatgctaaacgccactgcgccgggcaaggtttccggtttacccgcaatcgccagatccgcttcaccagtgaccaccttttccatcgcatctgccgcatcaccagtagtaagtttaatctccacgctcgggtgttccgcgcggaagcgatccagaatcggcggcagatggctgtaggcagcggtcacgctgcagaagatatgtaattcgccagagaggctcggcccttgctgatcgatggtgtggcgcaactgctgatactgcaacagcgtttgctgggcgaaaacgcgcagctcttcgcccgcttcagtcagcgtcaccgtgcggttatcgcgcacaaacagcggctgaccgagatcttcttccaggcgctgaatctgccgactgagcgtggatgggctaacgtgcatcgcccgcgcgctgcggccaaaatggcggctttccgccagatgcaggaaggttttcagatcgcgtaaatccacagggacagccctcgatgttgacgttgcaaaaattgcaatgtgacgttgtgaatatatcaatttccgcaataaatttcctgtcatatagtgaattcaatctcgcaaacgcgaaccgaacaataagaagcacaacatcacgaggaatcaccatggctaactacttcaatacactgaatctgcgccagcagctggcacagctgggcaaatgtcgctttatgggccgcgatgaattcgccgatggcgcgagctaccttcagggtaaaaaagtagtcatcgtcggctgtggcgcacagggtctgaaccagggcctgaacatgcgtgattctggtctcgatatctcctacgctctgcgtaaagaagcgattgccgagaagcgcgcgtcctggcgtaaagcgaccgaaaatggttttaaagtgggtacttacgaagaactgatcccacaggcggatctggtgattaacctgacgccggacaagcagcactctgatgtagtgcgcaccgtacagccactgatgaaagacggcgcggcgctgggctacagccacggtttcaacatcgtcgaagtgggcgagcagatccgtaaagatatcaccgtagtgatggttgcgccgaaatgcccaggcaccgaagtgcgtgaagagtacaaacgtgggttcggcgtaccgacgctgattgccgttcacccggaaaacgatccgaaaggcgaaggcatggcgattgccaaagcctgggcggctgcaaccggtggtcaccgtgcgggtgtgctggaaagctccttcgttgcggaagtgaaatctgacctgatgggcgagcaaaccatcctgtgcggtatgttgcaggctggctctctgctgtgcttcgacaagctggtggaagaaggtaccgatccagcatacgcagaaaaactgattcagttcggttgggaaaccatcaccgaagcactgaaacagggcggcatcaccctgatgatggaccgtctctctaacccggcgaaactgcgtgcttatgcgctttctgaacagctgaaagagatcatggcacccctgttccagaaacatatggacgacatcatctccggcgaattctcttccggtatgatggcggactgggccaacgatgataagaaactgctgacctggcgtgaagagaccggcaaaaccgcgtttgaaaccgcgccgcagtatgaaggcaaaatcggcgagcaggagtacttcgataaaggcgtactgatgattgcgatggtgaaagcgggcgttgaactggcgttcgaaaccatggtcgattccggcatcattgaagagtctgcatattatgaaagtctgcacgagctgccgctgattgccaacaccatcgcccgtaagcgtctgtacgaaatgaacgtggttatctctgataccgctgagtacggtaactatctgttctcttacgcttgtgtgccgttgctgaaaccgtttatggcagagctgcaaccgggcgacctgggtaaagctattccggaaggcgcggtagataacgggcaactgcgtgatgtgaacgaagcgattcgcagccatgcgattgagcaggtaggtaagaaactgcgcggctatatgacagatatgaaacgtattgctgttgcgggttaagtgcgcgctgatgccctcaccccgaccctctcccacagggagagggagaaaacactcaaggccttctcctggagaaggccttgctattagttgcggtacagcaccttaatgatgtgatatccgaactgggtgtgcagcgggccggtcggctccagtaccggacaagagaaaaccactttatcgaacgccggaaccatctgaccctggcggaattcacctaaatcaccgccgcgtttgccacttgggcaaatggagtgtttcttcgccagcttgccgaaatcggccccgttcttaatctgctcgagaagatccagagccagtttctcttcttttacaaggatatgcagtgctgctgctgtttttgccatgatcgtgccttgagtgaataattgtcaggcggcgattttagcatgatccgcagatgctaacgtaattgtcagtcagggagtggctggtacatatatggcaaaagcccggaaaatccgggcttcgcaggtccctcaaggggagaaaacttagggcctctatgggctacaaagtcattatcggggatggttattttattgtcaatttatgaggcttatggcattgatactcttgatgaccgccctctgtatgtctgcaaccaactcatgtggcaaacattgattaagataccctctgtaagtccttgctctgtttaatctgtttcgactgacttgttgtaccaggtcggctttggcccaacgaatctgctgatcaaagaattgcaggtcattgataacattactggctatttcaacatgcattccacgttttaacttgtctggtcggctgtggttgataatggaacgacgatgcatgcgttgccattaatttttccgttgagcacgacaactaacctgttttttatcatttcaggaggaatgcggccatcgtaatacgtcgtgctgaacggtccattttggctaacaggatagttaccaaagttgcattccagtatttcaccaaccttagggctgaaattaatcgccacgagtaaacctctccttagtaaactctgaaaaagtaataacacaacgttacgacccgatattttctaagtctaatggattcacgatgaactccgatttcggtcttctctctctgatttaaacatccgcagccaaccggttagcggcttacacgcggtcacattcaaatgcgattctgctacaatcctccccccgttcgaagattgagcaatacacctatgcgtctaaaccccggccaacaacaagctgtcgaattcgttaccggcccctgcctggtgctggcgggcgcgggttccggtaaaactcgtgttatcaccaataaaatcgcccatctgatccgcggttgcggttatcaggcgcggcacattgcggcggtgacctttactaataaagcagcgcgcgagatgaaagagcgtgtagggcagacgctggggcgcaaagaggcgcgtgggctgatgatctccactttccatacgttggggctggatatcatcaaacgcgagtatgcggcgcttgggatgaaagcgaacttcagcttgtttgacgataccgatcagcttgctttgcttaaagagttgaccgaggggctgattgaagatgacaaagttctcctgcaacaactgattagcaccatctctaactggaagaatgatctcaaaacaccgtcccaggcggcagcaagtgcgattggcgagcgggaccgtatttttgcccattgttatgggctgtatgatgcacacctgaaagcctgtaacgttctcgacttcgatgatctgattttattgccgacgttgctgctgcaacgcaatgaagaagtccgcaagcgctggcagaacaaaattcgctatctgctggtggatgagtatcaggacaccaacaccagccagtatgagctggtgaaactgctggtgggcagccgcgcgcgctttaccgtggtgggtgacgatgaccagagcatctactcctggcgcggtgcacgtccgcaaaacctggtgctgctgagtcaggattttccggcgctgaaggtgattaagcttgagcagaactatcgctcttccgggcgtattctgaaagcggcgaacatcctgatcgccaataacccgcacgtctttgaaaagcgtctgttctccgaactgggttatggcgcggagctaaaagtattaagcgcgaataacgaagaacatgaggctgagcgcgttactggcgagctgatcgcccatcacttcgtcaataaaacgcagtacaaagattacgccattctttatcgcggtaaccatcagagccgggtgtttgaaaaattcctgatgcaaaaccgcatcccgtacaaaatatctggtggtacgagctttttctctcgtcctgaaatcaaggacttgctggcttatctgcgcgtgctgactaacccggacgatgacagcgcatttctgcgtatcgttaacacgccgaagcgagagattggcccggctacgctgaaaaagctgggtgagtgggcgatgacgcgcaataaaagcatgtttaccgccagctttgatatgggcctgagtcagacgcttagcggacgtggttatgaagcattgacccgcttcactcactggttggcagaaatccagcgtctggcggagcgggagccgattgccgcggtgcgtgatctgatccatggcatggattatgaatcctggctgtacgaaacaagccccagcccgaaagccgccgaaatgcgcatgaagaacgtcaaccaactgtttagctggatgacggagatgctggaaggcagtgaactggatgagccgatgacgctcacccaggtggtgacgcgctttactttgcgcgacatgatggagcgtggtgagagtgaagaagagctggatcaggtgcaactgatgactctccacgcgagcaaagggctggagtttccttatgtctacatggtcggtatggaagaagggtttttgccgcaccagagcagcatcgatgaagataatatcgatgaggagcggcggctggcctatgtcggcattacccgcgcccagaaggaattgacctttacgctgtgtaaagaacgccgtcagtacggcgaactggtgcgcccggagccgagccgctttttgctggagctgccgcaggatgatctgatttgggaacaggagcgcaaagtggtcagcgccgaagaacggatgcagaaagggcaaagccatctggcgaatctgaaagcgatgatggcggcaaaacgagggaaataatcaaggccggaaaagatgcgtcagcatcgcatccggcacttactcattaatgcacttccagcggccagtggacatagctctgccactggctttcctgagcaataatctctttacccagcggatgttgggttagccaaccttgcggaagcgtcaaggtcaacagttcatggttagcctgtaatgtcatctctggcacgagatcgtcacggcgacggctggcaaaaatgatggccaggcgtagtaaacggcagagttgttctgcgacgcgcggcggtacggcattttgctgatgcaggctactgagatcgaccggattagtctggttgagcagtagcgtcgccagcaattttttctgtgcgggggtaaaaccgggaagatccagattacgcaccagataagcagcgtgttgcggcgcttgtttgaagtcaacgctcaggccgatttcatgaagctgacaggcgctgatgagcaaatcgcggcttattgcttcaagatgccattcgttttccacctgatcgaagaagttagccgcaactttggctacgcgctgtgcctgatcaatatcgatcataaagcggcgttgaatattacgcagcgtacggctgcgaatatcctgctcgacggccagatgcaacatgccgtagaccaggccttcacgcagcgcaccgcccgccagggtcatacactgaatattcagttcggtaaaaatggcgatcaggatcgccagaccactcgggaacactaacgcacgttccagcgtcagcccgtcaatctccagttcctccagccgaccgcaatgaatggctcgctgtttcaattgctgcaacttttccagggtaatgcgttcatccatcccctgtgccatcatgatttcctgtaacgcctgcacggtgccggaagcaccaacgcacactttccagccgtgataccgtaattcatcggcaaccggacgtaacacttcgcgtgccgctttttctgcagcatcaaaattttcctgccccagattacgatcggcaaaatagcgttccagccaggtgacgcagcccatgctcaggctgaacaagctggtggtttgtgcacccgtgccggttaccagttcagtactggctccgcctatatccaccaccaggcgctgatcggcaccaccagtggtgtgagcaacgccctgataaatcagacgtgcttcctcttcaccgctgatcacctgtaccggacaaccgagaatttcctgcgctttggcaataaaatcacccgcattgacggcaaggcgtaacgtcgccgtagcgacaacgcgaatttggctgggaggaatatcttgcagacgttcagcaaacaggcgcaaacattgccaaccgcgctccattgcttcattggagagggcattttcgctattcaggccagcagccagacgcactttgcgttttattcgcgtcagcgtctggatgcttccagccacctcgcgcacaaccagcatatgaaaactattgctaccgagatcaatggctgcatacaggctgctggtggaacccatactcttcatccttcaatctgtctctgtgttggctgcattctttcacctgaatcacttactacagtaagctcatcgggattcattctcttgccatcttgatacagtttgaatgattttgagtatgacattttttatttaaccactacgacgacgattacgcggagcgccagtacgacgcggaccattgcctgtgcgcgggcgcgtgaggcgcagcggttttggcagatcggtcatcaatgcgtccggattgtatttgcttaccggaatactgtgaccaatataggtctcaatagcaggcaaattcaatgcatactcttcacacgccaggctgatagagtgaccgcttgcgcctgcgcgacctgtacgaccaatacggtgaacgtaatcttcacagtcatcgggtaaatcgtagttaaagacgtgcgtcactgccggaatatgcaaaccacgcgcggcaacgtcggtggcaaccagaatatccagatcgccacgggtaaattcatcaagaatacgcagacgttttttctgcgcgacatcgcctgtcaataaaccgacacgatgaccatctgctgccaggtggccccagatctcttcacaacggtgtttggtgttggcgaaaataatcgctctgtctggccactcttcttcgatcagcgtttgcagcaaacgcattttttcttcgttagaagggtagaaaagctcttctttaatacggtggcccgttttctgttccggttccacttcaatatattcggcattgttcatctgctcgaacgccagttcacgtacccggtagctaagcgtggcggagaacagcatgttgaggcgctggtttgcaggcggcatacggcggaacagccagcggatatctttaataaagcccagatcgtacatgcgatcggcttcgtccagtaccaccacctgaatggcaccgaggttaatgtggttctgcttggcgtagtcaattaaacgccccgtggtgccaatcagaatgtcaacgccgctttccagcactttcagctgtttgtcgtagccatcaccaccgtaagccagacccagcttcaggccagtagcttccgccagcggttctgcgtcggcatggatctgcacggcaagttcacgcgtcggtgccataattaaggcacgcggctgattcaccttgcgatcggcaatcgcaggatgagagagaagataatgaaacgtactcgtaagaaacgccatcgttttcccggtaccggtttgcgcctgcccggctacgtcacgacccgccagcgtcagcggaagggccagtgcctgaatgggcgtacagttatgaaacccttttttttcaagggcttctacaaccttcggatgcagggcgaagtcggaaaacttctgttctgttaaatgtgttttgctcatagtgtggtagaatatcagcttactattgctttacgaaagcgtatccggtgaaataaagtcaacctttagttggttaatgttacaccaacaacgaaaccaacacgccaggcttattcctgtggagttatatatgagcgataaaattattcacctgactgacgacagttttgacacggatgtactcaaagcggacggggcgatcctcgtcgatttctgggcagagtggtgcggtccgtgcaaaatgatcgccccgattctggatgaaatcgctgacgaatatcagggcaaactgaccgttgcaaaactgaacatcgatcaaaaccctggcactgcgccgaaatatggcatccgtggtatcccgactctgctgctgttcaaaaacggtgaagtggcggcaaccaaagtgggtgcactgtctaaaggtcagttgaaagagttcctcgacgctaacctggcgtaagggaatttcatgttcgggtgccccgtcgctaaaaactggacgcccggcgtgagtcatgctaacttagtgttgacttcgtattaaacataccttattaagtttgaatcttgtaatttccaacgcttcccgttttatcttaaatgcgaagtgaacagatttctggcagcagtctcaatccgtcttgtcgtttcagttctgcgtactctcctgtgaccaggcagcgaaaagacatgagtcgatgaccgtaaacaggcatggatgatcctgccataccattcacaacattaagttcgagatttaccccaagtttaagaactcacaccactatgaatcttaccgaattaaagaatacgccggtttctgagctgatcactctcggcgaaaatatggggctggaaaacctggctcgtatgcgtaagcaggacattatttttgccatcctgaagcagcacgcaaagagtggcgaagatatctttggtgatggcgtactggagatattgcaggatggatttggtttcctccgttccgcagacagctcctacctcgccggtcctgatgacatctacgtttcccctagccaaatccgccgtttcaacctccgcactggtgataccatctctggtaagattcgcccgccgaaagaaggtgaacgctattttgcgctgctgaaagttaacgaagttaacttcgacaaacctgaaaacgcccgcaacaaaatcctctttgagaacttaaccccgctgcacgcaaactctcgtctgcgtatggaacgtggtaacggttctactgaagatttaactgctcgcgtactggatctggcaagtcctatcggtcgtggtcagcgtggtctgattgtggcaccgccgaaagccggtaaaaccatgctgctgcagaacattgctcagagcattgcttacaaccacccggattgtgtgctgatggttctgctgatcgacgaacgtccggaagaagtaaccgagatgcagcgtctggtaaaaggtgaagttgttgcttctacctttgacgaacccgcatctcgccacgttcaggttgcggaaatggtgatcgagaaggccaaacgcctggttgagcacaagaaagacgttatcattctgctcgactccatcactcgtctggcgcgcgcttacaacaccgttgttccggcgagtggtaaagtgttgaccggtggtgtggatgccaacgccctgcatcgtccgaaacgcttctttggtgcggcgcgtaacgtggaagagggcggcagcctgaccattatcgcgacggcgcttatcgataccggttctaaaatggacgaagttatctacgaagagtttaaaggtacaggcaacatggaactgcacctctctcgtaagatcgctgaaaaacgcgtcttcccggctatcgactacaaccgttctggtacccgtaaagaagagctgctcacgactcaggaagaactgcagaaaatgtggatcctgcgcaaaatcattcacccgatgggcgaaatcgatgcaatggaattcctcattaataaactggcaatgaccaagaccaatgacgatttcttcgaaatgatgaaacgcagttaaatttgtcttatgccaaaaacgccacgtgtttacgtggcgttttgcttttatatctgtaatcttaatgccgcgctggcgatgttaggaaaattcctggaatttgctggcatgttatgcaatttgcatatcaaatggttaatttttgcacaggactggtgggtttggaacggactttcccttctgaataaaggtcttcgtggttatacttctgctaataattttctctgagagcatgcattgtgaatttactgacagtgagtactgatctcatcagtatttttttattcacgacactgtttctgttttttgcccgtaaggtggcaaaaaaagtcggtttagtggataaaccaaacttccgcaaacgtcaccagggattgatacctctcgttggggggattagcgtttacgcagggatttgcttcacgttcggaattgtcgattactatattccgcatgcatctctctatctcgcttgtgccggtgtgcttgttttcattggcgcgctggatgaccgttttgatatcagcgtaaaaatccgtgccaccatacaggccgctgttggcattgttatgatggtgttcggcaagctttatctcagtagcctgggttatatctttggctcctgggagatggtgctcggaccgtttggttacttcctgacgctatttgccgtctgggcggccattaatgcgttcaacatggttgatggcattgatggcttgctgggcgggttgtcctgcgtcagctttgcagcaatcggtatgattttgtggttcgacgggcaaaccagcctcgcaatctggtgctttgcgatgatcgccgccatcctgccatacatcatgcttaaccttggtatcctgggtcgccgctacaaagtctttatgggtgatgcgggcagtacgctgattggttttaccgttatctggatcctgctcgaaacgacccagggcaaaacccatcccatcagcccggttaccgctttgtggataatcgccattccgctaatggatatggtggcgattatgtaccgtcgcctgcgtaaaggcatgagcccattctctcctgaccgtcagcatattcaccatttgatcatgcgtgccgggtttacttcccgtcaggcgtttgtgctgattacccttgccgcagcactgctcgcttccattggcgtgctggcagaatattctcattttgtcccggagtgggtcatgctggtgctctttttgctagcattcttcctctatggatattgcattaagcgtgcctggaaagttgctcgctttattaagcgcgtaaaacgcagactgcgtagaaatcgtggtggcagccccaatttaaccaaataaatgaggatgtgatgacacaaccaatgcctgggaaaccggccgaagacgctgaaaatgaactggatattcgtgggttgtttcgtaccttgtgggctgggaagctatggattattggcatggggctggcgtttgcgttaatcgcgctggcgtatacgttttttgctcgtcaggagtggagcagcacggcgattaccgatcgtccaacggtgaatatgctggggggatattacagccagcagcaatttttgcgtaacctggatgtccgtagtaacatggcttctgccgaccaaccaagcgtcatggacgaagcctataaagagtttgttatgcaactggccagctgggatacccgcagagagttctggctgcaaaccgactattacaaacagcggatggtgggcaacagcaaagccgatgcggcgttgctggatgaaatgattaacaacatccagtttatccccggagactttacccgcgcggtcaatgacagcgtgaagcttattgccgaaaccgcgcctgacgctaataacctgttacgtcagtatgttgcttttgccagccagcgtgcagccagccatctgaatgatgagctgaaaggcgcatgggcggcgcgtaccatccagatgaaagctcaggtgaagcgtcaggaagaggtggcgaaagccatctacgaccgccggatgaacagcattgagcaggcgctgaaaattgctgagcagcataatattagccgcagtgcgacagatgtacctgccgaggaattacctgatagtgaaatgttcctgcttgggcgtccaatgcttcaggctcgactggaaaatttacaggccgtcggtccggcctttgatctcgactatgatcagaatcgggccatgttaaacaccctgaatgttggtccaaccctggatccgcgttttcagacctatcgctatttgcgtacgccggaagaaccggtaaaacgcgatagcccacgtcgtgccttcctgatgattatgtggggcattgtcggggggctgatcggggctggtgtcgcattaacccgccgttgcagcaaataacaacactgctgcggtgagcgcaaaggcgctcgccgcttattcgaagagaatcgatgtgaaagtactgactgtatttggtacgcgcccggaagccatcaagatggcgccgttggtgcatgcgttggcaaaagatcctttttttgaggctaaagtttgcgtcactgcgcagcatcgggagatgctcgatcaggtgctgaaactcttttccattgtacctgactacgatctcaacataatgcagccaggacagggcctgacagagataacctgtcggattctggaagggctaaaacctattcttgccgagttcaaaccagacgtcgtgctggttcacggcgatacgacgacgacgctggcaaccagcctggcggcgttttatcagcgtattcctgttggtcacgttgaggctggtctgcgcacgggcgatctctatagcccgtggccggaagaggctaaccgtacattgaccgggcatctggcgatgtatcacttctctccaaccgaaacttcccggcaaaacttgctgcgtgaaaacgttgcggatagccgaatcttcattaccggtaatacagtcattgatgcactgttatgggtgcgtgaccaggtgatgagcagcgacaagctgcgtagtgaactggcggcaaattacccgtttatcgaccccgataaaaagatgattctggtgaccggtcacaggcgtgagagtttcggtcgtggctttgaagaaatctgccacgcgctggcagacatcgccaccacgcaccaggacatccagattgtctatccggtgcatctcaacccgaacgtcagagaaccggtcaatcgcattctggggcatgtgaaaaatgtcattctgatcgatccccaggagtatttaccgtttgtctggctgatgaaccacgcctggctgattttgaccgacagtggcggcattcaggaagaagcgcctagcctggggaaacctgtgctggtgatgcgcgataccactgagcgtccggaagcggtgacggcgggtacggtgcgtctggtaggcacggataagcagcgaattgtcgaggaagtgacgcgtcttttaaaagacgaaaacgaatatcaagctatgagccgcgcccataacccgtatggtgatggtcaggcatgctctcgcattctggaagcgttaaaaaataatcggataagtctatgagttttgcgaccatttctgttatcggactgggttatatcgggctgccaacggcagcagcgtttgccagtcggcaaaaacaggtaattggtgtcgatatcaaccaacatgcggttgataccatcaatcgtggcgaaatccatatcgtcgaacctgatttggcgagtgtagtaaaaactgccgtagaaggcggttttttacgagcgagcacgacgccagttgaagcggatgcctggctgattgctgtacccacgccgtttaagggcgatcatgagccagatatgacctacgttgaaagcgctgctcgctccattgcgccagtgctgaaaaaaggcgcgctggtgatccttgaatccaccagcccggtggggagtaccgagaagatggcagaatggttagcagagatgcgtccggatctcactttcccgcagcaggtgggcgagcaggcggacgtcaacattgcttactgcccggaacgcgtgttaccaggacaggtaatggtcgagctgattaaaaacgatcgcgtgattggtggtatgacgccggtttgtagcgcccgcgccagcgaactgtacaaaattttcctcgaaggtgagtgtgtcgtcactaacagccggacggcggaaatgtgtaagctcaccgaaaacagcttccgcgatgtgaatatcgcttttgctaatgaattgagcctgatttgtgccgatcaggggattaacgtctgggaactgattcgcctggcgaatcgtcaccctcgcgttaatattcttcagcctggccctggcgtgggcggtcactgcattgctgttgatccgtggtttatcgtggcacagaacccccagcaggcgcggcttatccgtaccgcgcgcgaagtgaacgatcacaaaccgttctgggttatcgatcaggtgaaagcggcggtggctgattgcctggcggctaccgataaacgcgccagtgaactgaaaatcgcctgctttggtctggcgtttaaaccgaatattgatgacctgcgcgaaagcccggcgatggaaatcgctgaactgatcgcccagtggcatagcggcgaaactctggttgttgagcctaacatccaccagttgccgaaaaaactgaccgggctttgtactctggcgcagcttgacgaggcgctggcaacggcagacgtgctggtgatgctggtcgatcatagtcagttcaaagttatcaatggcgacaatgtccatcagcagtatgtcgtcgatgccaaaggagtctggcgctgatgagaaaaattctgataacaggtggtgccgggtttattggcagcgcgctggtgcgttatatcatcaacgaaacgagcgacgcggtggtagtggtcgataagctgacctacgccggaaacctgatgagcctggcaccggtcgcgcaaagcgagcgctttgcctttgagaaagttgatatctgcgatcgggcagaactggcacgcgtattcactgagcatcagccagactgtgtcatgcatctggcagccgaaagccatgttgaccgttctattgacggcccggcagcgtttattgaaaccaacattgtcgggacttatacattgcttgaagcggcgcgggcttactggaatgcgctgacggaagataaaaaaagtgcgttccgttttcatcatatctccactgacgaagtatatggtgacctgcacagcacggatgatttcttcaccgaaaccacgccgtatgcgccgagcagcccttattccgcgagtaaagccagcagcgaccatctggtgcgcgcctggctgcggacctatggtctgccgacgcttatcaccaactgcagcaataactacggcccttaccactttccggaaaaactgatcccgctgatgatcctcaacgcgctggcgggtaaaagcctgccggtatatggcaacgggcagcaaatccgtgactggctgtatgtggaagatcacgcccgcgcgctgtattgcgtggcgaccaccgggaaagtcggtgaaacctataatattggtggtcacaacgagcgtaagaatctcgatgttgtggaaaccatttgcgagctgctggaagaactggctccgaacaagccgcacggcgtggcgcactatcgtgacctgatcacctttgtcgctgaccgtccggggcatgatctgcgttatgccattgatgctagcaaaattgcccgtgaacttggctggctgccgcaggaaacctttgaaagtggaatgcgtaaaacggttcagtggtatctggctaatgaaagctggtggaagcaggtgcaggacggcagctatcagggcgagcgtttaggtctgaaaggctaattttcagcggaggcaaacatgaaaggtattatcctggcgggcggttccggcacccgattgcatccgattacgcgcggcgtaagcaagcaactgttgccgatttacgataagccaatgatttactatccgctgagcgtgctgatgctggccggtatccgcgaaattctcatcatcactacgccggaagataaaggttatttccagcgcctgctgggcgatggtagtgagttcggtatccagctggaatatgccgaacagcccagcccggacggtctggcgcaggcctttatcatcggtgaaaccttccttaatggtgaaccttcttgtctggtgctgggcgataacatcttcttcggtcagggcttcagtccgaagctgcgtcatgttgcggcgcgcaccgaaggggcgacggtttttggctatcaggtgatggacccggaacgctttggcgtggtggagtttgacgacaatttccgcgctatcagcctggaagaaaagccaaaacagccgaagagtaactgggcggtgaccgggctttatttctacgacagtaaagtcgtggagtacgcaaagcaggtgaagccgagcgagcgtggtgaactggagattacctccatcaaccagatgtacctcgaggcgggcaacctgaccgttgaactgctcgggcgcggatttgcctggctggataccggcactcacgacagcctgattgaagccagcacctttgtacagacggtggaaaaacgccagggctttaagattgcctgcctggaagagattgcctggcgtaacggctggctcgatgacgagggtgtgaagcgtgctgccagtagtttagcgaaaactggctacggccaatatctgctggagttacttcgtgcccgtccgcgccagtattgagccactaacctgggaaaacgccttctttggtgttaacagcgccatcgtgcgcattacgtctgaagcaccgctcctgacgccagacgcgttagcgccgtggtcacgggtgcaggccaaaattgcggcaagtaatacgggtgaactggatgccctgcaacagctgggattctccctggtagaaggtgaagttgatttggcgctacccgtgaacaatgccagtgatagcggtgctgtagtggcacaagagaccgatattcccgcattacgtcagttagccagcgccgcatttgcgcaaagccgttttcgtgcgccgtggtatgcgcctgacgccagcagtcgcttttatgcacagtggattgaaaatgccgtgcgcggcacctttgatcatcaatgtctgattttacgtgcggcgtccggcgatattcgcggctatgtctctttacgggaactcaatgcgacagatgcgcgaattggcctgctggctggacgcggtgcaggtgctgagctgatgcaaacggcgctaaactgggcgtatgctcgcggtaaaacaactttgcgggtggcgacccaaatgggcaacaccgccgcgcttaaacgatacatacaaagtggtgcgaatgtagaaagcaccgcgtactggttatacaggtgatcacatgattccatttaacgcaccgccggtggtgggaaccgaactcgactatatgcagagcgcaatgggtagcggcaaactgtgtggcgatggcggttttacccgtcgctgccagcagtggctggagcaacgttttggcagcgccaaagtgttactgacgccgtcctgcaccgctagcctggagatggcggcgctgctgctcgatatccagcctggcgatgaagtgatcatgccgagctacacctttgtctccaccgccaatgcctttgtgctgcgtggcgcaaaaatcgtttttgtggatgttcgcccggacaccatgaacatcgacgaaacgctgattgaagcggcgatcaccgacaaaacgcgcgttatcgtgccggtccattacgcgggtgtggcctgcgaaatggacaccattatggcgttggcgaaaaagcataatttgtttgtggtagaagatgccgctcagggcgtgatgtccacttacaaagggcgtgcactgggaaccattggtcatattggctgctttagcttccatgaaaccaaaaactacacggcgggcggtgaaggcggcgcgacgctgattaacgataaagcgttaatcgaacgagccgagatcatccgtgaaaagggcactaaccgcagccagttcttccgtggtcaggtcgataaatatacctggcgcgatattggctccagctatttgatgtccgatctgcaagctgcatacctgtgggcgcaactggaagcagcggatcgtatcaaccagcaacgtctggcgctgtggcaaaactactacgatgcgttagcgcctctggcgaaagccgggcgtatcgagctgccgagcattcccgatggctgcgtgcagaacgcgcatatgttctacattaaactgcgggatattgatgaccggagcgcgttgattaactttctgaaagaagcggaaatcatggcggtgtttcattacattccgctgcacggttgccctgcgggggaacactttggtgagttccacggtgaagatcgctacaccaccaaagagagcgagcgcctgctgcgcctgccgctgttctacaacctgagccccgtcaatcagcgtacggtaattgcgactttgttgaactacttttcctgatatgagcttggcaaaagcgtccttgtggacggcggccagtacactggtcaagattggtgccgggttactggtcggtaagttgctggcggtgagttttggtccggcggggcttgggctggcggcaaatttccgccagttgattaccgtgctcggcgtgcttgccggggctggcatctttaacggtgtaaccaaatacgttgcccagtaccatgataatccgcaacagctgcgccgcgtggtcggcactagtagtgcgatggtacttggtttctctacgctgatggcgctggtttttgtgctggcagctgcgccaatcagccagggattgtttggtaataccgactatcaggggctggtgcgtttagtggcgctggtgcaaatggggatcgcctggggcaacctgttactggcgctgatgaaaggctttcgcgatgccgcaggtaatgcgttaagcctgattgtcggcagcttgattggcgttctcgcgtactacgtcagttaccgtttgggcggttatgaaggggcgttgctgggtctggcgctgattcccgcgctggtggtaattcctgccgccatcatgttgatcaaacgtggtgtcatcccgttaagctatctgaaacccagctgggataacggtctggcagggcagttgagcaaatttacgctcatggcgttgattacgagcgtgaccttgcctgttgcttacatcatgatgcgtaaactgctggcggcgcagtatagctgggatgaggtggggatctggcaaggggtgagcagtatttccgatgcctacctgcaatttattacggcaagcttcagcgtatatttgctgcccacgttgagccggctaacggaaaagcgcgatatcacccgggaagtggttaaaagcctgaaattcgtcttaccggcagtggcggcggcgagttttaccgtctggctgctgcgtgattttgctatctggctgctgttgagcaataaatttaccgctatgcgcgatctctttgcctggcagttagtgggtgatgtgttaaaagtgggcgcttatgtctttggttatctggtgatcgccaaagcgagtctgcggttttatattctggcggaagtcagccagttcactttattgatggtatttgcccactggctaatccctgcgcatggtgcactgggcgcggcgcaggcatatatggcaacttatatcgtctatttttctctttgttgtggcgtgtttttactctggcgtaggcgggcatgactgtactgattcacgtactgggaagcgatatccctcaccataaccgaaccgttttgcggtttttcaatgacgcgctggccgcgacgagcgagcacgcgcgcgagtttatggttgttggcaaggacgacggcttaagtgatagctgtccggcgctttctgtgcaatttttccctgggaaaaaaagcctggcggaagcggtcatcgcgaaagcaaaagctaaccgtcagcagcgttttttcttccacggtcagttcaatcccacactgtggctggctctgctgagtggtggcattaagcccagccagtttttctggcatatctggggggcagacctgtatgagctttccagtggcttgagatataagcttttttacccactacgtcgcctggcgcaaaagcgagtcggctgtgtatttgccacccgcggcgatttgagcttttttgccaaaacgcacccaaaggtgcggggcgaactgctgttcttcccgacgcggatggaccctagcctcaatacgatggcgaacgatcggcaacgtgaagggaaaatgaccattctggtggggaactccggcgaccgcagcaatgagcatattgctgccttgcgcgccgttcatcagcaatttggcgatacggtaaaagtggtggtgccgatgggatatccgcctaataacgaagcgtacattgaggaagttcgtcaggcggggctggagttattcagcgaagaaaatctacaaattctgagcgaaaaactggaatttgacgcctatctggcgctacttcgtcagtgcgatcttggttactttatttttgcccgccagcagggcattggtacgctgtgcttactgattcaggcgggcattccttgtgtgcttaaccgggaaaatccgttctggcaggatatgacggaacaacatttgccggtgctgtttactaccgacgatctcaacgaggatattgtgcgtgaagcgcagcgccagttggcgagcgtggataaaaacaccattgccttctttagccctaactatctacaaggctggcagcgggcgttggcgattgccgccagggaggtcgcatgagtctgctgcaattcagtggcctgtttgttgtctggctgctctgcacgctgtttattgccacgctgacctggtttgagtttcgccgtgtgcgctttaacttcaatgtcttctttagtttgctgtttttgctcacctttttcttcggcttcccgctgaccagcgtgctggtatttcgctttgatgttggtgtcgcgccgccagaaatcttgttgcaggcgttgctttctgcgggctgcttctacgcggtttactatgtcacctacaaaacccgcctacgcaaacgcgttgctgatgtaccgcgccgtccgctgtttaccatgaaccgcgtggagaccaatcttacgtgggtgatcctgatgggtatcgcgctggtaagcgtcggcatcttcttcatgcacaacggctttttgctgttccggcttaactcctacagtcagatcttttccagtgaagtctccggcgtggcgttaaaacgcttcttttactttttcatcccggcgatgctggtggtctactttctgcgccaggacagcaaagcgtggctgtttttcctcgtcagcacggtcgcctttggcttgctgacttatatgattgtcggcggcactcgcgccaatatcatcatcgcattcgctatcttcctgtttattggcattattcgcggctggattagcttgtggatgctggcggcggcgggcgtgctggggattgttggcatgttctggctggcactaaaacgctatggaatgaatgtgagcggcgatgaagcgttctatacgtttctctatctcactcgcgacaccttcagcccgtgggagaatctggcgttgctgttgcagaactacgacaacatcgacttccagggcctggctccaattgtccgcgatttctatgtctttatcccttcctggctgtggccgggtcgcccgagtatggtgctgaacagtgccaactactttacctgggaagtgctgaataaccactccggactggcgatcagccctacgcttataggcagtctggtggtgatgggcggcgcgttgttcatcccgctcggggcgatcgtggttggtctgatcatcaaatggttcgactggctgtatgagctgggcaaccgcgagcctaatcgctataaagctgcgatattgcacagtttctgctttggggcgatcttcaatatgatcgtgctggcgcgtgaagggctggatagctttgtcagtcgcgtggtcttttttatcgtggtcttcggcgcatgtctgatgatcgcaaaactgttgtactggctttttgaaagcgccggactcattcataaacgtacaaaaagtagcctccggacgcaggttgaaggataacaatgaataacaacaccacggcaccaacctatacgctgcgtggcttacagttgattggttggcgtgatatgcagcacgccctcgattatctgtttgctgacgggcagcttaagcagggaacgctggttgccattaatgctgaaaaaatgctgactattgaagataacgccgaggtcagggagttaattaacgctgccgaatttaaatatgcggatggcatcagcgttgtacgtagtgtacgtaaaaagtacccgcaggcgcaggtttcccgcgttgccggtgccgatctctgggaagagctgatggcgcgcgcaggcaaagaagggacgccggtatttcttgtgggcggtaaacctgaagtgctggcgcaaactgaagctaaactgcgcaaccagtggaatgtgaatatcgttggcagtcaggatggttattttaaacccgagcagcgtcaggcgctgtttgaacgcattcatgccagcggtgcgcaaatcgtcaccgttgcgatgggaagcccaaagcaggagatcatcatgcgcgactgccgtctggtacatccagatgcgctgtatatgggcgttggcgggacttacgatgttttcaccggtcacgtaaaacgcgcaccgaaaatctggcaaacgctggggctggagtggctctaccgcctgcttagccagccgagccgcattaagcgtcagcttcgtttgctgcgttatttacgctggcactacaccggcaacctatgattttcctctctttgtaaagcgacggagtggtcactccgtcgcctgtctgcttttttattacacaaagcattcaaatttttaatgctttatttgccatttctcctgaattacgaaaacatttgcaacactcgatgtacccataacgataaccggtaacaccggaaagcatgcaaacacaacacgaggatttatggcagataacaaaccagagctacagcgtgggctggaagctcgacatatcgaactcatcgccctggggggcaccattggcgtcggcctgtttatgggggccgccagtaccctgaaatgggccgggccatccgtattgttggcctatatcatcgccgggctgttcgtctttttcatcatgcgtagtatgggcgaaatgttgttcctcgaaccggttaccggtagcttcgccgtttatgcgcatcgttatatgagcccgttctttggctatctcaccgcctggtcttactggtttatgtggatggcggtggggatctctgaaatcaccgccattggcgtttatgtccagttctggttcccggagatggcgcagtggatacccgcattgatcgcagtggcgctggtggcgttggcgaatctggcggcggtgcggttgtacggcgaaatcgagttctggttcgcgatgatcaaagtcaccacgattatcgtgatgattgtcattggcctgggcgtgattttctttggctttggcaatggcgggcagagcattggttttagcaatctcacagagcatggcggtttctttgcgggtggctggaaagggttcctgaccgctctgtgtattgtggtggcgtcctaccagggcgtggagctgattggcattactgccggtgaagcgaagaatccgcaggtgacgctgcgcagtgccgtaggcaaggtgctgtggcggatcctgattttctacgtaggcgcgattttcgttatcgtcaccatcttcccgtggaatgaaataggcagcaacggcagcccgttcgtactgacttttgccaaaatcggtattaccgcagcggcgggcattatcaactttgtggtgctgacggctgcgctctctggctgtaacagcggcatgtacagttgcggacgtatgctctacgcactggcgaaaaaccgtcagttaccggcggcaatggcgaaagtttcccgtcacggcgtaccggttgcgggtgtggcagtatctattgctattctgctaattggcagttgcctgaactacatcattcccaatccgcagcgtgtgtttgtctacgtctacagtgccagcgtgcttccggggatggtgccatggtttgtgatattgataagccagctgcgttttcggcgtgcacataaagcggcgattgccagccatccgttccgcagtatcctgttcccgtgggccaattacgtaacaatggcattcctgatttgcgttttgatcggcatgtactttaatgaagatacgcgtatgagcctgtttgttggcatcatctttatgctggcggtgacggcgatttataaagtttttggccttaatcgccacgggaaagcgcataaactggaggaataagcagcaaaacgcacaaaccgtaaccaaacgcgcaatttatttaaaaagggactagacagaggggtgggaagtccgtattatccacccccgcaacggcgctaagcgcccgtagctcagctggatagagcgctgccctccggaggcagaggtctcaggttcgaatcctgtcgggcgcgccatttagtcccggcgcttgagctgcggtggtagtaataccgcgtaacaagatttgtagtggtggctatagctcagttggtagagccctggattgtgattccagttgtcgtgggttcgaatcccattagccaccccattattagaagttgtgacaatgcgaaggtggcggaattggtagacgcgctagcttcaggtgttagtgtccttacggacgtgggggttcaagtccccccccccctcgcaccacgactttaaagaattgaactaaaaattcaaaaagcagtatttcggcgagtagcgcagcttggtagcgcaactggtttgggaccagtgggtcggaggttcgaatcctctctcgccgaccaattttgaaccccgcttcggcggggttttttgttttctgtgcatttcgtcaccctcccttcgcaataaacgcccgtaataactcattgccccacggtatgatttcgcccttaacgtattgaaggatgacttcaggcaaggagcgaccatgctgcaacaggttccaacgcgtgcttttcatgtgatggcgaaaccgagcggttccgattgtaatctgaactgtgactactgtttttatctcgaaaaacaatccctttaccgcgaaaagccagtcacgcatatggacgatgacacgctggaagcgtatgtccgtcactatatcgctgccagcgaaccgcaaaacgaagtggcttttacctggcagggcggcgaaccaacgctactcgggctggcgttttaccgccgtgccgtagcgctacaggcgaaatatggtgctggcaggaagataagtaacagcttccagactaacggcgtgctgctggatgacgaatggtgcgcgtttctcgcggagcatcattttcttgttggtttaagcctggatggcccgcctgagatccacaatcaatatcgcgtgactaaaggtggcagacccacgcataagctggtgatgcgtgccctgacgctcctgcaaaaacatcatgtcgactataacgtgctggtctgcgttaatcgcaccagcgcgcagcaaccgttgcaggtatatgattttttgtgcgatgcgggagtcgaattcatccagtttattccggtggtcgagcgcctggctgatgaaacaactgcccgcgatggacttaagttacatgcgcctggtgatattcagggtgagctaacggaatggagcgtgcgccccgaggagttcggtgagtttctggtggcgatattcgaccactggatcaaacgcgacgtcggcaagattttcgtgatgaatatcgaatgggcgtttgccaattttgtcggtgcgccgggtgcggtttgccatcatcagccaacctgtgggcgcagcgtgattgttgagcacaacggcgacgtttacgcctgtgatcactatgtttatccgcaatatcggctggggaatatgcaccagcaaacaattgcagaaatgatcgattccccgcaacagcaggcgtttggtgaagataaatttaagcagttaccggcgcagtgtcgcagttgtaacgtgttaaaagcgtgctggggaggctgcccgaaacaccgcttcatgctcgatgccagcggcaaaccgggactgaattatttgtgtgccgggtatcagcgttatttccgccatctaccgccatatcttaaagcaatggctgatttgctggcgcacggtcgcccggccagcgacattatgcatgcgcatttgctggtggtgagtaagtaaaaatcggcggccgcctgcggttgattgccggatgcggcgtaaacgccttatccggcctacatgatcgtgcaaattcaataaattgcagcgttctgtaggctggataagatgcgtcagcatcgcatccggcaaaggcagatctcagcgatagcgccggcttagtcagatttaatctgcgcgcgtggtggatattttttcaggatctccatatacgcgtgcatttcggtctgtagcggtacacccatcggaatatggcgcacgccgatggagtcgctttcctgcggatcggtgtagaggttaaacacgctgcttcccgccgtttgcattactgtgccggtgaatccaccctgatatccgctctgggtataagcgtaaggttgctgaatcaggacgtgatacttgaactcatccatacgcacagcagcgagtttaccgttgaggaagtagtgctcggccttacggttagactgaccatttgttcccaggaagaaggatgtctggtccacaccatcgataaaggtggttttcggcactaaattcgccactttcgctccaggatgccctgccagatccagcgcggtagggaagagatctgccagatcgacaataccgtcagatttacgcggttggatcatccctttccagtaaacgaaagtcggtacgcgaacgccgccttcccaggtgctacctttcgcaccacggaacggggtgcgtccgtgcggcggtacttcggcttccggtccgttatcggaggtaaagacgatcagcgtgttatcaagctgaccgtttttctccagtgttttatacagattagcgaacacatcgttcatctccaccatgcagtcgccatagctggtgcgtgccggagagctacccgcatatttcgcatttgggtagttatcgaagtggcagccacgagtgccgtagtagaggaagaatggtttatcgctcttcgccatcttgtcgaggaacttaacgccatagtccatccagcgttgatccagatcttccatatatttcggcgtaatgtcggcaatggcctgttgttcgccgccgcgcaccgcatgaacgtcatctttgctgaacggtaattgcttgatgtattcagaacggtccggactcagggccacttccggattgacgtgaacgtcgcgccattcggtgtacatatcagacacgctgttaaagccacggaaatcatcaaagccaacgttctgcggctggctctctttgttttcccccatatgccattttccgatggcctgagtgacgtagccctgatcgtgcagcaactgcggcagcgtggttaacccttgcagcccgcccggttgcccgtacattggcggcatcagaatgccgtggtggatggagtattgtccggtgagaatggtggcgcgggttggggaagagcttggttgagaatacgcgctagttaaaatcagcccctggctggcaacggcgtcgatatctggtgtagggttacccaccgccacgccgccaccgttaaaaccgacgtccatccagcccacatcgtccagcaagaaaacaaccacattcggtttcttaccggtttttttctcaagttctgccagcttctgctgggtttctttatcctgcgccggatgctgcattactggcatcatattgtcggcaatagtggtcgccggtttaaccagatactggtttgggtgatcgtatccggcaaagcctttgcgtgcggtggcagtactcggggtatctgctgcgctggccatgagaggaagagcggcggcgacagcaacaacaagacgtttgggactaaagctaaattccatgcaaaatgctccggtttcatgtcatcaaaatgatgacgtaattaagcattgataattgagatccctctccctgacaggatgattacataaataatagtgacaaaaataaattatttatttatccagaaaatgaattggaaaatcaggagagcgttttcaatcctacctctggcgcagttgatatgtaaggcaggtttattatatcgcgttgattattgatgctgtttttagttttaacggcaattaatatatgtgttattaattgaatgaattttatcattcataataagtatgtgtaggatcaagctcaggttaaatattcactcaggaagttattactcaggaagcaaagaggattacagaattatctcataacaagtgttaagggatgttatttcccgattctctgtggcataataaacgagtagatgctcattccatctcttatgttcgccttagtgcctcataaactccggaatgacgcagagccgtttacggtgcttatcgtccactgacagatgtcgcttatgcctcatcagacaccatggacacaacgttgagtgaagcacccacttgttgtcatacagacctgttttaacgcctgctccgtaataagagcaggcgtttttttatgtatcaggaaggccccggaggtgcttgcctccgggtgagaaggaattactgtggcgggttattctgcaacgttaacatcaaaccgtcgcgacgcatagctgcagcttcttccggcttgtgcagtctgtccagcgcgtcggcaagccatgcgtaatcgtaggcgtccggacgttgtttcagcgctgcgcggaaggcgaggcttgcttcctgccattctccgtgcttcatcagactctggcccagtgtgctccacaacagcgggcgatcgccgacgtttttgatttgctggcgcagcactttttccagctgttccggattgtttgttttcagtcgaggaatcggcagcagtaggcgatcgtcgtactggcgtttcaggccatcgatgataatttgctgggcagtatcatgatcgtcacattcaataagatgttccgccattgccacctgcaacgctacctgatgacgcgttttccggctttggtttttccaccagttacgcaaaccttcgctaccgttatcggcacgcgcctgatccatcaggccaatccatgcctgttgttccagcattgcacgatgttcttcatcaccaacatgggctttcgccatacttgggataatatccagcaggctactccatgcacctgtgcggatatacgcctgttccgccagacgtaatacttccggatggcgtggcgtaacttccagcagcttatccacgccgtggcgtgcagcatggttttcattacgggccagttgcagacgtacgcgggtgatttctaccggaatggtgtcgttgccggccagctccgctgcgcgttccagatgttggttggcgcgtgcttcatcaccacgttgttgcgcggcttcggcagccagtagatagttcaccaccggttgttccgcgtgatcggcatttttcgccatcagcttttcaacttgctgataatcgccttccgccagtttcagcagcgcctgttcggtctgcttacgtgcacggcgacgcttacgtccgacaaaccacccacgggtgtgcgcgccagtgcggaagatccgccgcagtagccactcaatggcaaacagcactaccatcgccagaatcaatatgatcgccaggcccgtgacgctggtttcgatattgtagttgtcggtctggatcagcacataaccctgatggccggcaatcatcgggccaaccacgatccccgcaatcagcaacacaaagagcaataacacttttagcatggttattctccttgcggcgcggctgccggagtatcagcttgcggtgcaggtgcaggtttagcttccgttgtccccgctgccggttgtgccagcaggttacgcacgcgagtctgcatcagtttttccagcatcgcctggctttgcagggtttccggaagatccatgctgatattttgctggcttaactggtccacctcgtcgaggaacgctttggtggtggcatcatcagtatcgtagtaagcacgtacccaggtggagacgttctccagcgcctggcgataagtctcttcctggtgacgcggtacagcttgtgctgcgaccagcaggcgagagcgaatattttcgcgcagatagatatcctgatttggcgctaacagcggtacggcggtgtcatcacgacggcgaatcgtaatgaagttgtccataaagttctgccagcttttttgcagattgatacgccattcgctgatggaactggaaagctcttcaccgtcactatccatcgggctaccatcgctgtcattatcggccagacgcaggttatctacctgattactaagctgattaagcttaaggatgatgccgtcataatccacctggcttactgcagaaaggctggcgatatcatcggtaattgcccgacgaacggtaatcagactcgggtcattcatatccgccaggctggcgtctgcacttttcagcaacgctgcagcggtcgtgacgtcctgatcgctccacagcttccgtccggcgagtttcaccagaaaatcggcctgagccagcagccaggttttagcatcgctgccggaaatggtggcgaccttttgttggacttcatccaactgttttgccagcgtttcttgctgacgattcgcctgcttaagttgtgcagcttgttgcttaataatgccttccagctcggctttttggctctcctgggctttttgcaatgccgtcagttggttagccagggcatcgctggtggcggtctgattgacggcctgttgtttaccccagccatacaaaccgatgcccgccgccagagcaatagcgatagccaccgcgctgagaatcaatgcggtattgttcttactctttttttctgttgcgacaggttgactcgtggtgtccacggcctccctggtctcttcaaccacggcggaggttttttcttgttccgtcattatggcttcctgttatgagagttattgtaatgcccgtaaaagcgcatcgttgtcagcgttatcggcgaccttaatgtcttgccagcccagttcccgggcgagtttcgccaaacgctcactgacgaccaatagtcgacagtgtagtaaccagtgctcacgataccattgtgggatcaggctccagagttgctgcaacatttcaccgctggtaacaacgaccatcgtcacctcgcgggcttgccagcgcatcgcttcttctgcaccatcgtaatggattgcgcatcgttgataacattcacaaaaagtgacctcagcaccgcgcgccgtcagggtatccccaattagctcacgaccaccattgccacgtaatatcagcgcacgtttgcccgcaatattttgtaattcaggtaattgtagcaagacttcgctgatttcccgatcctgcgggtagagaatcttctgtccacttacggtatgtagtgccagtgcggtggtgcgtccaatggcgaaataatcaggtagtcggggccatttacgatcttgctgatgcagctgactttgggcaaaagcaaccgcgtgttggctgagggcaaacaacagatcgctctcccccagcgctgccagttgatcagcaagttgcggtaattgttgacccggagaaaactcaatcagcggaaaatgccaggccacctgccccagtgtgcgcagacggctcactaactcttctccagcgggagacgggcgggtgacaaggatactcatgccggggcgtctccgttatagacttcagcgaggatctcgcgcgcgccgttattcagtagctcttctgccaggctaatccccatttgttcggcatcttgcggcgcaccgcggcgttcaccgcgaataatctggctaccgtccggcgcgccgaccagcgcacgcagccagatttcgccatcaataagctcggcgtagctaccaattggcacctgacatccgccttcgagacgggtattcatggcgcgttctgcggtaacgcgcagtgcagtttcgtggtgattcagcgcggcaagcagctcgcgagtgcgactatcatcaaggcggcattcaatacccaccgcaccttgtcctaccgccggaagagaaatctcgggtggcaacgcggcgcgaatacgactctccagacctaaacgttttagtccggctacggcaagaatgatggcatcgtattcgccgttatccagtttgctcaggcgagtgccgacgttgccgcgcagggagcggataatcagatccggacggcgttcagccagttggcactggcgacgtaaactggacgtcccgacgatactgcctgccggtaacgcatccagactgtcatagttattggacacaaaggcatcgcgaggatcttcacgctcacaaatagtgaccagtcccagaccttgcgggaattcaaccggcacatctttcatactgtgtacggcgatatcggcgcgattttcgaggagcgcgacttccagctcttttacaaataagccttttccgcctactttcgccagcggcgtatcaagaatcacatcgccgcgcgtcaccatcggtaccagttcaacgaccaggcccggatggctcgccatcaacttgtctttgacatagtgtgcctgccagagtgcaagtgggctttggcgtgtggcaattcttaaaacattgtctaacatgcttgttaccgtcattatcatccgtggtccatcctaacatccttgccagagtgatgtcagtgttgtggtgaaacgtagacgcctgcgcaaaccgtaaaatgaggtctggcagtggatcctgacaggcgtttcacgccgttgtaataaggaatttacagagaataaacggtgctacacttgtatgtagcgcatctttctttacggtcaatcagcaaggtgttaaattgatcacgttttagaccattttttcgtcgtgaaactaaaaaaaccaggcgcgaaaagtggtaacggttacctttgacatacgaaatatcccgaatgccgcgtgttaccgttgatgttggcggaatcacagtcatgacgggtagcaaatcaggcgatacgtcttgtacctctatattgagactctgaaacagagactggatgccataaatcaattgcgtgtggatcgcgcgcttgctgctatggggcctgcattccaacaggtctacagtctactgccgacattgttgcactatcaccatccgctaatgccgggttaccttgatggtaacgttcccaaaggcatttgcctttacacgcctgatgaaactcaacgccactacctgaacgagcttgaactgtatcgtggaatgagtgtacaggatccgccgaaaggtgagcttccaattactggtgtatacaccatgggcagcaccagctccgtagggcaaagttgttcctctgacctggatatctgggtctgtcatcaatcctggctcgatagcgaagagcgccaattgctacaacgtaaatgtagcctgctggaaaactgggccgccagcctgggtgtggaagtcagcttcttcctgattgatgaaaaccgcttccgtcataatgaaagcggcagcctggggggcgaagattgtggctccacccagcatatactgctgcttgacgaattttatcgtaccgccgtgcgtctcgccggtaagcgtattctgtggaatatggtgccgtgcgacgaagaagagcattacgacgactatgtgatgacgctttacgcgcagggcgtgctgacgccaaatgaatggctggatctcggtggcttaagcagcctttctgctgaagagtactttggtgccagcctttggcagctctacaagagtatcgattccccatacaaagcggtactgaaaacactgctgctggaagcctattcctgggaatacccgaacccacgtctgctggcgaaagatatcaaacagcgtttgcacgacggcgagattgtaagctttggtctcgatccatactgcatgatgctggagcgtgttactgaatacctgacggcgattgaagattttacccgtctggatttagtacgtcgctgcttctatttaaaagtgtgcgaaaagctcagccgtgaacgcgcctgcgtaggctggcgtcgcgcagtgttgagccagttagtgagcgagtggggttgggacgaagctcgtctggcaatgctcgataaccgcgctaactggaagattgatcaggtgcgtgaggcgcacaacgagttgctcgacgcgatgatgcagagctaccgtaatctgatccgctttgcgcgtcgcaataaccttagcgtctccgccagtccgcaggatatcggcgtgctgacgcgtaagctgtatgccgcgtttgaagcattaccaggtaaagtgacgctggtaaacccgcagattagtcccgatctcagcgaaccgaatctgacctttatttatgtgccgccgggccgggctaaccgtagtggttggtatctgtataaccgcgcgccaaatattgagagcatcatcagccatcagccgctggaatataaccgttacctgaataaactggtggcgtgggcatggtttaacggcctgctgaccagccgcacccgtttgtatattaaaggtaacggcattgtcgatttgcctaagttgcaggagatggtcgccgacgtgagccaccatttcccgctgcgcttacctgcaccgacaccgaaggcgctctacagcccgtgtgagatccgccatctggcgattatcgttaacctggaatatgacccgacagcggcgttccgcaatcaggtggtgcatttcgatttccgtaagctggatgtcttcagctttggcgagaatcaaaattgcctggtaggtagcgttgacctgctgtaccgcaacagctggaacgaagtgcgtacgctgcacttcaacggcgagcaaagcatgatcgaagccctgaaaactattctcggcaaaatgcatcaggacgccgcaccgccagatagcgtggaagtcttctgttatagccagcatctgcgcggcttaattcgtactcgcgtgcagcaactggtttctgagtgtattgaattgcgtctttccagcacccgccaggaaaccgggcgtttcaaggcgctgcgcgtttctggtcaaacctgggggttgttcttcgaacgcctgaatgtaagcgtacagaaactggaaaacgccatcgagttttatggcgcgattagccataacaaactgcacggcctgagtgtgcaggttgaaaccaatcacgtcaaattaccggcggtggtggacggctttgccagcgaagggatcatccagttctttttcgaagaaacgcaagacgagaatggctttaatatctacattctcgacgaaagcaaccgggttgaggtatatcaccactgcgaaggcagcaaagaggagctggtacgtgacgtcagtcgcttctacagcagtagccatgaccgttttacctacggcagtagcttcatcaacttcaacctgccgcagttctatcagattgtgaaggttgatggtcgtgaacaggtgattccgttccgcacaaaatctatcggtaacatgccgcctgccaatcaggatcacgatacgccgctattacagcaatattttagctgatgaacgtgccggaaagcgaggcttatccggcatgcaatcttagcggaaactgactgtttcacccgcctgctgcgtcgccgcctgttccagcaaatcccagaaggtttcgccgctgcgatcacaaatccactcatcgcctttcaggtcaaaatggtagccgccctgtttggttgccagccatacctggtgcagcggctcctggcggttgataatgattttgctgccattctcaaaggtaatggtcagtacgccgccgttgatttcgcagtcgatatcgctgtcgccatcccagtcgtccaggcgttcttcaatggtcagccagagttgatcagccaggcgatgaaattcactgtcgttcattgttgtatcctgtttttaagtgatggcggcagtatagcggcatggggtcagggcttcaaagtttgcacctctgcggctgcgttccggcacgatagttccgtcaccggaataatgatgtctctgtgtagcgaaagatttgtctctagtttagggcgcagttacaccacgtctttccctgtttctggtaaacattatgatcaggtttaccgagcgagcatcctcacgctgacggaactaaaaaagacaacaaacaaaccacattgcgatagtgcataaagccatcctggcgcgaggtgccgatcacgaaactaccagcaaaacataaatccccacgagtaagcgttatactcgcagcatttcctcacttttcagacttcataaagagtcgctaaacgcttgcttttacgtcttctcctgcgatgatagaaagcagaaagcgatgaactttacaggcaatccataatgaaaaacgtgtttaaggcactcactgtattacttactctcttcagcctgacgggctgcggtctgaaaggtccgctctatttcccgcctgcagataaaaacgcaccgccgccgaccaaaccggtagagacgcaaacgcaatccacggtgccggataaaaacgatcgcgccactggcgatggtccatcccaggtgaattactaaaagtcagtttctgtacccgcgtgattggagtaaatgatgcagttcagcaaaatgcatggccttggcaacgattttatggtcgtcgacgcggtaacgcagaatgtcttttttagtccggagctgattcgtcgcctggctgatcggcacctgggggtagggtttgaccaactgctggtggttgagccgccgtatgatcctgaactggattttcactatcgcattttcaatgctgatggcagtgaagtggcgcagtgcggcaacggtgcgcgctgctttgcccgttttgtgcgtctgaaaggactgaccaataagcgtgatatccgcgtcagcaccgccaacgggcggatggttctgaccgtcaccgatgatgatctggtccgcgtaaatatgggcgaacccaacttcgaaccttccgccgtgccgtttcgcgctaacaaagcggaaaagacctatattatgcgcgccgccgagcagacaatcttatgcggcgtggtgagcatgggaaatccgcattgcgtgattcaggtcgatgatgtcgataccgcggcggtagaaacgcttggtcctgttctggaaagccacgagcgttttccggagcgcgccaatatcggttttatgcaagtggttaagcgcgagcatattcgtttacgcgtttatgagcgtggggcaggagaaacccaggcctgcggcagcggcgcgtgtgcggcggttgcagtagggattcagcaaggtttgctggccgaagaagtacgcgtggaactccccggcggtcgtcttgatatcgcctggaaaggtccgggtcacccgttatatatgactggcccggcggtacatgtctacgacggatttattcatctatgaagcaaccaggggaagaactgcaggaaacactcacggagcttgatgaccgggcggttgtcgattatctgattaaaaatcctgagttttttatccgtaatgcgcgcgcagtagaagcgatacgtgtgccgcatccggtacgcggcaccgttagcttggtcgagtggcacatggcccgcgcacgtaatcatattcatgttctggaagagaacatggcgctgttgatggaacaggctatcgccaacgaaggcctgttttatcgcctactctacctgcagcgcagtctcaccgccgccagcagtctcgacgatatgctgatgcgctttcaccgctgggcgcgcgatctcggcctggcaggtgcgagtctgcgcctgtttccggatcgctggcgcttaggtgcgccgagcaaccacactcatctggcattaagccgtcagtctttcgaaccgctgcgtattcagcgtttggggcaggaacagcactatcttgggccgcttaacggaccagagctgctggtggtgctaccggaagcgaaagcggtgggaagcgtggcgatgagcatgctgggaagcgatgctgatttgggtgtcgtgctgtttaccagtcgcgatgccagtcactatcaacaagggcaaggaacgcagttacttcatgaaattgcgctgatgttgccggagcttctggagcgttggattgaacgcgtatgaccgatttacacaccgatgtagaacgctacctacgttatctgagcgtggagcgccagcttagcccgataaccctgcttaactaccagcgtcagcttgaggcgatcatcaattttgccagcgaaaacggcctgcaaagctggcagcaatgtgatgtgacgatggtgcgcaattttgctgtacgcagtcgccgtaaagggctgggagcagcaagtctggcgttacggctttctgcgctacgtagcttttttgactggctggtcagccagaacgaactcaaagctaacccggcgaaaggtgttagcgcaccgaaagcgccgcgtcatctgccgaaaaacatcgacgtcgacgatatgaatcggctgctggatattgatatcaatgatcccctcgctgtacgcgaccgtgcaatgctggaagtgatgtacggcgcgggtctgcgtctttctgagctggtggggctggatattaaacacctcgacctggagtctggtgaagtgtgggttatggggaaaggcagcaaagagcgccgcctgccgattggtcgcaacgctgtggcgtggattgagcactggcttgatttgcgcgacctgtttggtagcgaagacgacgcgctttttctgagcaaactgggcaagcgtatctccgcgcgtaatgtgcagaaacgctttgccgaatggggcataaaacaagggctgaataatcacgttcatccgcataaattacgtcacagcttcgccacgcatatgctggagagcagcggcgatcttcgtggtgtgcaggagctgctgggtcatgccaacctctccaccacgcaaatctatactcatcttgattttcaacaccttgccagcgtgtacgatgcggcgcatccacgcgccaaacgggggaaataatgcgtttttaccggcctttggggcgcatcagcgcgctcacctttgacctggatgataccctttacgataaccgtccggtgattttgcgcaccgagcgagaggcgcttacctttgtgcaaaattatcatccggcgctgcgcagcttccagaatgaagatctgcaacgcctgcgccaggcggtacgggaagcggaacccgagatttatcacgacgtgacgcgctggcgttttcgtagcattgaacaagcgatgctcgacgccgggctgagtgccgaagaagccagtgcaggcgcacacgcagcaatgatcaactttgccaaatggcgcagccgaatcgacgtcccgcagcaaactcacgacaccttaaaacagctggcgaagaaatggccgctggtggcgatcaccaacggtaacgcccagccggagctgtttggtttgggggattattttgagtttgtgctgcgcgctggcccgcacgggcgcagtaaaccgttcagcgatatgtactttttggctgcggaaaaactcaacgtgccgatcggcgagatcttacatgttggggacgatctcaccactgacgtgggtggggcaattcgcagcggaatgcaggcttgttggatcagaccggaaaatggcgatctgatgcaaacctgggacagccgtttactgccgcatctggaaatttcccggttggcatctctgaccagcctgatataatcagcaaatctgtatatatacccagctttttggcggagggcgttgcgcttctccgcccaacctatttttacgcggcggtgccaatggacgtttcttacctgctcgacagccttaatgacaaacagcgcgaagcggtggccgcgccacgcagcaaccttctggtgctggcgggcgcgggcagtggtaagacgcgcgtactggtgcatcgtatcgcctggttgatgagcgtggaaaactgcagcccatacagcattatggcggtgacgtttaccaacaaagcggcggcggagatgcgtcatcgtatcgggcaactgatgggcacgagccagggcggtatgtgggtcggcaccttccacgggctggcgcaccgtttgctgcgtgcgcaccatatggacgccaatctgccgcaggatttccagatcctcgacagtgaagaccagctacgcctgcttaagcgtctgatcaaagccatgaacctcgacgagaagcagtggccgccgcggcaggcaatgtggtacatcaacagccagaaagatgaaggcctgcgtccgcatcatattcaaagctacggtaatccggtggagcagacctggcagaaggtgtatcaggcgtatcaggaagcgtgtgaccgcgcgggcctggtggacttcgccgagctgctgctgcgcgctcacgagttgtggcttaacaagccgcatatcctgcaacactaccgcgaacgttttaccaatatcctggtggacgaattccaggataccaacaacattcagtacgcgtggatccgcctgctggcgggcgacaccggcaaagtgatgatcgtcggtgatgacgaccagagtatctacggctggcgcggggcgcaggtggagaatattcagcgtttccttaatgatttccccggtgccgaaactattcgtctggagcaaaactaccgctctaccagcaatattctgagcgccgctaacgccctgattgaaaacaataacgggcgtctgggtaaaaaactgtggaccgatggcgcggacggtgagcctatttccctctattgcgcttttaacgaactcgatgaagcgcgttttgtggttaaccgcatcaaaacctggcaggacaacggcggagcgcttgccgagtgcgccattctctaccgcagcaacgcccagagccgggtgctcgaagaggcgttattgcaggccagtatgccgtaccgtatttacggcgggatgcgcttcttcgaacgccaggaaatcaaagatgcgctcagctatctgcgcctgattgccaaccgcaacgacgacgcggcctttgagcgtgtggtgaatacgccaacgcggggtattggtgaccggacgctggacgtggtacgtcagacaagccgcgatcgccagttaacactctggcaggcatgtcgtgagctgttgcaggaaaaagccctcgccgggcgagctgccagcgccttgcagcgatttatggaattaatcgacgccttagcgcaggaaactgccgatatgccgctgcatgtacagactgaccgggtaattaaagactccggcctgcgtaccatgtatgagcaggagaagggcgaaaaaggtcagacgcgtatcgaaaacttagaggaactggtgacggcaacgcgccagttcagctacaacgaagaagacgaagatttaatgccgctgcaggcgttcctctcccatgcggcactggaagcaggtgaagggcaggcggatacctggcaggatgcggtgcagttgatgacgctacacagcgcgaaaggcctggagttcccgcaggtgtttatcgttggtatggaagagggcatgttcccaagccagatgagcctggatgaaggcgggcgtctggaagaagaacgccgtctggcctacgttggcgtaacccgcgcgatgcagaaactgacgctgacctacgcggaaacccgccgtctgtatggtaaagaggtttaccatcgcccgagccgctttatcggcgagctgccggaagagtgtgtggaagaggtgcgcctgcgcgccacggtaagccgcccggtcagccatcagcggatgggtacgccgatggtcgagaacgacagcggctacaagctcggccagcgcgtacgccacgctaagtttggtgaaggcaccattgtcaatatggaaggcagcggtgagcatagccgtttgcaggtggcatttcagggccagggtattaaatggctggtggcggcatacgcccggctggagagcgtgtaacgttgccggatgcggtgctgcgcaccttatttggcctaaaaaatcattcagattcaataaattgcaacgtcatgtaggccggatagggcgtttacgccgcatccggcatctgcgccatcttcagtatctgacacaaaactatcgttttaacctttccgctcgacggaaatcatggtgacaaaaggatagcgttgccacgggattgccccgcctttcatatacatatgactaatcgtgccatcaagataaagcagctgctcaacgttcagtttcgctttggcataacaggcaaaatcataaaaatttgttgcctgctggctcaacaaaaacacggcgttcccatgtttattaatcccaacaccgttacgaattttgctactggcgacgttgggatgaatacgcggattaattacaccgttttccatcaacattggcccactctgcaccgcaaactgaatctctttactggttttgaaggcatccagacgaacgatgccgactttatctcccgcgacataaaacacgccgccaggacggataaagaaattcccttcaccactagcgagatttaacgccaccttctgctgaccgttttcgatgtacaaaccgagcggcgcatagctttcatcatagatgccgccgttcatcgccatctgcacctgaccctgactattaatatccgccagcagagcatgtaacgttccccacgcttcgccattggctttttgccagtacattttcacccgctctgtttgaggattaacggtatacgcctgtacggtcagcgtcggatcactgagtgcgcaatcatcagcggcaacagcaaacaagggaagtaaggtgagggcgagaaaaatccgtttgagattcaaggtgatcattcctttaccaatgagtagctgatgcgccattataggtcctggatgtgggatttttttatcctgttagcgaccttgacgagtaccaaaaagcgcgaagttcaactattgttctgtggtgttctgttgcgtgttgacggcaaaattttgctggcgtaacatgcgcgcacgatcactctaagaggacattcgccttggacacacccagtagatactggctcactatcctgtcatccaggatcaactcctaaggctatccctttttgctgatagccttagcggttgtcagcgacctcaatttttcccgtcgcgctgagtcaggctgtttaatggtctgaaacccaatttgtttctgtgtgcccaccgaactgtccgatattttaagcattgggagtcccggtcatgctgagcgcatttcaactggaaaataaccgactgacccggctggaagtcgaagagagtcaaccccttgtaaatgcagtatggattgatcttgtcgaaccggacgacgacgagcgactgcgcgtacaatctgaacttggccagagcctggcaacccgcccggaactggaagacatcgaagcaagcgcacgtttctttgaagacgacgacggcctgcatattcactccttcttcttctttgaagatgcggaagatcacgccggtaactccactgtggcatttaccatccgtgatggtcgtctgtttactctgcgtgagcgtgaactgcccgcttttcgtctgtatcgtatgcgtgcccgtagccagagcatggtagacggtaacgcctacgagttgctgctggatctgttcgaaaccaaaatcgaacagttggcagatgaaattgaaaatatctatagcgacctggagcagttgagccgggtgattatggaagggcatcagggcgatgagtacgacgaggcgctctccactctggcggaactggaagatatcggctggaaagttcgcctgtgtctgatggatacccagcgcgcgctcaacttcctggtgcgtaaagcgcgtttaccgggtgggcaactggagcaggcgcgtgaaatcctgcgagatatcgaatccctgctgccgcataacgaatccctgttccagaaggtgaacttcctgatgcaggcggcaatgggttttatcaacatcgagcagaaccgcatcatcaaaatcttcagcgtggtatccgtggtattcctgccgccgacgctcgttgcttccagctatggcatgaactttgagtttatgccagaactgaagtggagcttcggctaccctggcgcgattatctttatgatcctcgcgggcctggcaccgtatctgtactttaagcggaagaactggttgtaaaaaacgagagcggtggcttagtctggctaagccacctgttattcaaaggctccaggtatttaacccttttacctctttctcatagaaccatttgttcgtgttaacagcaacataggctgctacggcaattcccagaatgttaacgccaattagtgcaccaacaaatagagatagaataccaagtaatagaactataattgcttttttccataaccccaggacaaataaatatatccaggaacagaagaaagcaatgaaattcatttgaatagttaagcgttgtcttacttttaatgctttaaatgctgctttatattctggtgttgccccccagaatccaggaaaaccatgttgatcataaaaattaaatcggtatttccatttttcacttaaactaccatcgttcatatattccttactcataaatactccataattattgtttactactatcagtaggtgcaagcattagcatactgaaagtggaaaaataacaaatcaaaaaaatcatgctaccattgccactacaggcaaaatcttcggctatcattgtgatgatagagatgatatatactgctaatgtaccaaaaacataagtttttatatagatgaaaccactatcacggagtcgctggcaattcatgttgatgacgagataatggagtacgatggtagagactataacaagaaagcctgcttctccatcgttaaaaaagataataagaaaggcaaaaatgaaatttattaaaataaaactaaatatataacgacgtctggaaatcttaccgttagatgttgggataaatatacgtaacataaattttacatccttgtatgagtctccggtcagcatggcaatatgcccactctcatgcaagagtcggcatattttttcagaatatatttattttttatttggacgttctacgctgcgtataaatcgcatccatcacaaaaattgccagcgccacccaaataaaggcgaaagtcaccatcttatcggcacccggtttttcaccataaaacgtcacagccagcaggaacatcagcgtcgggccaatgtactggaaaaagcctaacgtactgagacgcaagcgcgtggcagcggcggtaaaacacaacagcggtacggtagtgacaataccggcggcgatcagcagtaaattcaggctcatcgggttttgccccatatggctggtactgctgtcggcaatagcaaacaggtaaattgccgccacgggcagcagccacatggtttcgattaacatgccggtttgcgcttcaacggcaatcttcttgcgtaccagaccgtagaaggcaaaactaaatgccagtcccagcgcgataataggtaggctaccaaaagtccacagctggactaacacgccacatatcgccagaatcaccgccagccattgcatccggcggaatcgctcgccgaggaaaatcatccccagcacaatgttcaccagcgggttaataaagtaaccaaggctcgcttccagcatatggtgattgttcaccgcccagataaacagtagccagttgccaccaatcagcacggcagagactgccagcataaaaattttctgtggcgtctgaatcagcgtttttaaataggaccactggcggcaaatgctcatcagcaccaccataaagaaaaagctccagatcacgcgatgcgtcaggatttcatcggcgggcacgtagtaaatcaacttgaagtacgctggcgctataccccaaataaaataagcggcaagagcgagtaatacgccctgccgcgtttgttttgcatccatcgggaatactcatttttaattggtaacagcagtttacctgcttttatgtcttcaacctaccatataggtggcggtggcactggcaatataaagctgttcttcattgtgtaattcaacgcgggcgacggcgactttattgcctgcacgcaacaggctactagtagcagtaaaacgctcgcccctgcctgggcgcagataatcaacgcgaagatcaatggtccccatccggcttagccgctggcgtagttcatcttcactgatggtttcgtggcgggttaaggtacttcccacgcacaccagaccggcggcgacatccagcgcgctcgcaatgaccccgccgtgcaaaatgctttgcgcccagttgcccaccatcattggctgatttttaaaggccagctgtgcgaactctttttcgtaacgctccagttccatccccaatgcgcggttaaatggcatgtgataaacaaacatctcacccactaatttcagggcttgttcagcggtcagtacggcagacatatcatccttacacttcattggttaatgaaatgttgattttatgcttctttgttgttggtttctactttaggaagggataactaacggctatggagttaagtatgtaaaatagcccgcagaaaaatattcaccttatcaataattcgttacggagaacacgaccgatgcggactctgcagggctggttgttgccggtgtttatgttgcctatggcagtatatgcacaagaggcaacggtgaaagaggtgcatgacgcgccagcggtgcgtggcagtattatcgccaatatgctgcaggagcatgacaatccgttcacgctctatccttatgacaccaactacctcatttacacccaaaccagcgatctgaataaagaagcgattgccagttacgactgggcggaaaatgcgcgtaaggatgaagtaaagtttcagttgagcctggcatttccgctgtggcgtgggattttaggcccgaacagcgtgttgggtgcgtcttatacgcaaaaatcctggtggcaactgtccaatagcgaagagtctagtccgtttcgtgaaaccaactacgaaccgcaattgttcctcggttttgccaccgattaccgttttgcaggttggacgctgcgcgatgtggagatggggtataaccacgactctaacgggcgttccgacccgacctcccgcagctggaaccgcctttatactcgcctgatggcagaaaacggtaactggctggtagaagtgaagccgtggtatgtggtgggtaatactgacgataacccggatatcaccaaatatatgggttactaccagcttaaaatcggctatcacctcggtgatgcggtgctcagtgcgaaaggacagtacaactggaacaccggctacggcggcgcggagttaggcttaagttacccgatcaccaaacatgtgcgcctttatactcaggtttacagcggctatggcgaaagcctcatcgactataacttcaaccagacccgtgtcggtgtgggggttatgctaaacgatttgttttgatgaacggttgagtggttggcaaatctggaatccagcatccaggattaccctctcagagactaaaagcattgcagtttctcgcgcaggcgctgaaaatagcgcctgtttttatttcaggcaatcggggtgaatgtggcgcaggcggaagtgttgaatctggagtccggagctaaacaggttttacaagaaacctttggctaccaacagtttcgccccggccaggaagaaattatcgacactgtgctttccggccgcgattgcctcgtcgtcatgcccactggtggcggaaaatccctttgctatcaaatccctgccttattgctaaacggccttaccgtggttgttagtccgctgattagcttgatgaaagatcaggtggatcaactgcaagccaacggcgtggcggcggcgtgccttaacagcacgcaaacccgcgaacagcaacttgaagtgatgacaggctgccgcaccgggcaaattcgtctgctttatatcgccccggaacgcctgatgctggataactttcttgagcatctggcgcactggaatccggtgttattagccgttgatgaagcgcactgtatctcccaatggggccacgatttccgcccggaatatgccgcgctcggtcagttgcgccagcggttcccgacgctgccgtttatggcgctgaccgccacagccgacgacaccacgcgccaggatatcgtgcgcctgctggggctgaacgatccgctgattcaaatcagcagttttgaccgtccgaatattcgctacatgctgatggagaagttcaaaccgctcgatcagttgatgcgctacgtgcaggaacagcgcggtaagagtggcattatctactgcaacagccgcgcgaaagtagaagacaccgctgcgcgcctgcaaagcaagggaattagcgcggcggcctatcatgccgggctggaaaataatgttcgcgccgatgtgcaggaaaaattccagcgcgatgacctgcaaattgtggtggcgacggtggcgttcggcatgggcatcaataaaccaaacgttcgcttcgtggtccactttgatattccgcgcaatatcgaatcctattatcaggaaaccggacgcgccgggcgtgatggcctgcccgcggaagcgatgctgttttacgatccggctgatatggcgtggctgcgccgttgtctggaagagaagccgcaggggcagttgcaggatatcgagcgccacaaactcaatgcgatgggcgcgtttgccgaagcgcaaacttgccgtcgtctggtattgctgaactattttggcgaagggcgtcaggagccgtgcgggaactgcgatatctgcctcgatccgccgaaacagtacgacggtagtaccgatgctcagattgccctttccaccattggtcgtgtgaatcagcggtttgggatgggttatgtggtggaagtgattcgtggtgctaataaccagcgtatccgcgactatggtcatgacaaactgaaagtctatggcatgggccgtgataaaagccatgaacattgggtgagcgtgatccgccagctgattcacctcggcctggtgacgcaaaatattgcccagcattctgccctacaactgacagaggccgcgcgcccggtgctgcgcggcgaatcctctttgcaacttgccgtgccgcgtatcgtggcgctcaaaccgaaagcgatgcagaaaagcttcggcggcaactatgatcgcaaactgttcgccaaattacgcaaactgcgtaaaagcatagccgatgaaagtaatgtcccgccgtacgtggtgtttaacgacgcaaccttgattgagatggctgaacagatgccgatcaccgccagcgaaatgctcagcgttaacggcgttgggatgcgcaagctggaacgctttggcaaaccgtttatggcgctgattcgtgcgcatgttgatggcgatgacgaagagtaatcagcagcataaaaaagtgccagtatgaagactccgtaaacgtttcccccgcgagtcaaatgtatgttgatgttatttctcaccgtcgccatggtgcacattgtggcgcttatgagccccggtcccgatttcttttttgtctctcagaccgctgtcagtcgttcccgtaaagaagcgatgatgggcgtgctgggcattacctgcggcgtaatggtttgggctgggattgcgctgcttggcctgcatttgattatcgaaaaaatggcctggctgcatacgctgattatggtgggcggtggcctgtatctctgctggatgggttaccagatgctacgtggtgcactgaaaaaagaggcggtttctgcacctgcgccacaggtcgagctggcgaaaagtgggcgcagtttcctgaaaggtttactgaccaatctcgctaatccgaaagcgattatctactttggcagcgtgttcagtttgtttgtcggtgataacgttggcactaccgcgcgctggggcatttttgcgctgatcattgtcgaaacgctggcgtggtttaccgtcgttgccagcctgtttgccctgccgcaaatgcgccgtggttatcaacgtctggcgaagtggattgatggttttgccggggcgttatttgccggatttggcattcatttgattattagccggtgatgccagacgcgtcttcagagtaagtcggataaggcgtttacgccgcatccgacattatttttcacgcatgcctcgcgcttgctaacagcgctcccaccagcataaacaagctgccgaaaatcttattcagcgccttcatctgctttggtcctttaatccatagagcaatccgttgagcaagggtggcgtaaccgatcatcacaataatatcgaccacaatagtggtgacgccgagcacgatatactgcatcagttgcggctgttgcggcatgatgaattgcggaaatagcgccgccagaaacacaatacttttgggattggtgagattcacaaaaactgcgcgctggaacaaatgtcgacggctttgagtagaggccaggcttttaaggtcaattgcaccagcggcgcgccactgctggattcccagccaaatcaagtaagccgcgcctgcccacttcaacacttcaaacgcaatcacactgcgggaaaatagcgtccccaaccccacgccaaccagcacaatatgaatcgccagtccggtctgaagcccagcaatagacgccaccgcgccgcgataaccgtggttgaggctggtggtcatagtgttgattgcaccagagcctgggctcaggcttaaaatgatgcttgtcagcaggtaggcaaaccaccattctaaggtcatgatgaactcccggtgtgtctatttttgtgccacaatacgctactgtcgcagcgttgtgtcaggcacgctaaaaaaaacgattttacgtggtttaagaggcagattacccgatgtttcagcagcaaaaagactgggaaacaagagaaaacgcgtttgctgcttttaccatgggaccgctgactgatttctggcgtcagcgtgatgaagcagagtttactggtgtggatgacattccggtgcgctttgtccgttttcgcgcacagcaccatgaccgggtggtagtcatctgcccggggcgtattgagagctacgtaaaatatgcggaactggcctatgacctgttccatttggggtttgatgtcttaatcatcgaccatcgcgggcagggacgttccggtcgcctgttagccgatccgcatctcgggcatgttaatcgctttaatgattatgttgatgatctggcggcattctggcagcaggaggttcagcccggtccgtggcgtaaacgctatatactggcacatagcatgggcggtgcgatctccacattatttctgcaacgccatccaggtgtatgtgacgccattgcgctaactgcgccaatgtttgggatcgtgattcgtatgccgagttttatggcacggcagatcctcaactgggccgaagcgcatccacgtttccgtgatggctatgcaataggcaccgggcgctggcgcgcgttgccgtttgctatcaacgtactgacccacagcagacagcgatatcgacgtaacttacgcttctatgctgatgacccaacgattcgcgtcggtgggccgacctaccattgggtacgcgaaagtattctggctggcgaacaggtgttagccggtgcgggtgatgacgccacgccaacgcttctcttgcaggctgaagaggaacgcgtggtggataaccgcatgcatgaccgtttttgtgaactccgcaccgccgcgggccatcctgtcgaaggaggacggccgttggtaattaaaggtgcttaccatgagatcctttttgaaaaggacgcaatgcgcagtgtcgcgctccacgccatcgttgattttttcaacaggcataacagtcccagcggaaaccgctctacagaggtttaaatttcttatgtaccaggttgttgcgtctgatttagatggcacgttactttctcccgaccatacgttatccccttacgccaaagaaactctgaagctgctcaccgcgcgcggcatcaactttgtgtttgcgaccggtcgtcaccacgttgatgtggggcaaattcgcgataatctggagattaagtcttacatgattacctccaatggtgcgcgcgttcacgatctggatggtaatctgatttttgctcataacctggatcgcgacattgccagcgatctgtttggcgtagtcaacgacaatccggacatcattactaacgtttatcgcgacgacgaatggtttatgaatcgccatcgcccggaagagatgcgcttttttaaagaagcggtgttccaatatgcgctgtatgagcctggattactggagccggaaggcgtcagcaaagtgttcttcacctgcgattcccatgaacaactgctgccgctggagcaggcgattaacgctcgttggggcgatcgcgtcaacgtcagtttctctaccttaacctgtctggaagtgatggcgggcggcgttagtaaaggccatgcgctggaagcggtggcgaagaaactgggctacagcctgaaggattgtattgcgtttggtgacgggatgaacgacgccgaaatgctgagcatggcggggaaaggctgcattatgggcagtgcgcaccagcgtctgaaagaccttcatcccgagctggaagtgattggtactaatgccgacgacgcggtgccgcattatctgcgtaaactctatttaagctaatcgttctttatttggtcagttgtcaacctgatacttcgctacaatggatacccgttaatcaaagagttttccattgtggcgctacttatcatcaccacgattctgtgggccttctcctttagcttttatggcgagtaccttgcggggcacgtcgatagctattttgcggtgctggtgcgcgttggcctggcggcactcgtttttctgccgtttctgcgtacccgtggcaatagcctgaaaacggtcggcctgtatatgctggtgggcgcgatgcagcttggcgtgatgtatatgctgagtttccgcgcttatctctacctgacggtttccgagctgctgctgttcaccgtgctgacgccgctctacatcacgctgatttatgacatcatgagtaagcgccgtctgcgctggggctatgcctttagcgccttgctggcggtgattggtgccgggattattcgctatgatcaggtcaccgaccatttctggactggcttgctgctggtgcaactctccaatatcacttttgccattggcatggtgggttacaaacgcctgatggaaactcgcccgatgccacagcataacgcctttgcgtggttctatcttggcgcgtttctggtggcagtgattgcatggttcttgctgggaaatgcgcagaaaatgccgcaaaccacgctgcaatggggcattctggtgtttcttggcgtggtggcttccgggattggctactttatgtggaactacggcgcgacgcaggtggacgccggaacgctgggcattatgaataatatgcacgttccggcagggctgctggtaaacctggctatctggcaccaacagccgcactggccaacgtttattacaggcgcgctggtgatcctggccagtctgtgggtgcatcgtaagtgggtcgctccgcgctctagtcaaacggcagatgatcgcaggcgtgattgcgcgctgagcgaataattacaggcgcgctggacttcctggcctcactgtgggtgcatcgtaagtgggtcgctccgcgctcttcacaaacggcagatgatcgcaggcgtgattgcgcgcactgcgaataaacgcttccgtaactggctgacgctgctcgccatcgcgcacggcggcgtacagtcggctccacaagccttcgcccagggttttggtcaccaccagaccctggcgctcaaaactctctactacccaatgcggtagcgcggcaatacccatccgcgcggcaaccatctgaatcaacaataaggtgttatcgacgcttttcagactcgggctgacgcctgccggctgaagaaaatgccgccagacatccagtcgactacgctgcaccggataaattaatagcgtctcgctggcgagatcttccggtgtaattcgcgttttcgccgccagtggatggtcaggtgctaacaccagacgcacttcatagtcgaacatcgggctataatgcaggccactgcgcggcagaatatcggacgtcattaccagatccagctctccctgttgcaaggcgggctgcgggtcaaatgtcacgccgcttttaaaatccatctctacctgcggccagttcttatggaaattttctaacgcgggtgtcagccactgaatacagctatggcactcaatggcaatgcgcagacgcgtctgctgcggttcattgcaggcttgcagggcctggctaatttgcggcagtacctggtttgccagttgcaacaggatttctccctgcggtgtaaagcgtagcggctggctcttacgcacaaatagccggaagccaaggcgttgttccagatcgctaaactggtgagacagggcggattgcgtctgatgcaacgtcgccgcagcggctgcgaggctgccgcagttccgcaacgcttgtagcgttttcaggtgttttacttcgatcatgaaagtccttcacttcggcatgaataatttgcgcttgaggaatatacagtaaccgccaattatggatgtgtaaacatctggacggctaaaatccttcgtcttttaaatttatggtgcgttggctgcgtttctccaccccggtcacttacttcagtaagctcccggggatgaataaacttgccgccttccctaaattcaaaatccataggatttacatataattagaggaagaaaaaatgacaatattgaatcacaccctcggtttccctcgcgttggcctgcgtcgcgagctgaaaaaagcgcaagaaagttattgggcggggaactccacgcgtgaagaactgctggcggtagggcgtgaattgcgtgctcgtcactgggatcaacaaaagcaagcgggtatcgacctgctgccggtgggcgattttgcctggtacgatcatgtactgaccaccagtctgctgctgggtaacgttccggcgcgtcatcagaacaaagatggtagcgtagatatcgacaccctgttccgtattggtcgtggacgtgcgccgactggcgaacctgcggcggcagcggaaatgaccaaatggtttaacaccaactatcactacatggtgccggagttcgttaaaggccaacagttcaaactgacctggacgcagctgctggacgaagtggacgaggcgctggcgctgggccacaaggtgaaacctgtgctgctggggccggttacctggctgtggctggggaaagtgaaaggtgaacaatttgaccgcctgagcctgctgaacgacattctgccggtttatcagcaagtgctggcagaactggcgaaacgcggcatcgagtgggtacagattgatgaacccgcgctggtactggaactaccacaggcgtggctggacgcatacaaacccgcttacgacgcgctccagggacaggtgaaactgctgctgaccacctattttgaaggcgtaacgccaaatctcgacacgattactgcgctgcctgttcagggtctgcatgttgacctcgtacatggtaaagatgacgttgctgaactgcacaagcgcctgccttctgactggttgctgtctgcgggtctgatcaatggtcgtaacgtctggcgcgccgatcttaccgagaaatatgcgcaaattaaggacattgtcggcaaacgtgatttgtgggtggcatcttcctgcagcttgctgcacagccccatcgacctgagcgtggaaacgcgtcttgatgcagaagtgaaaagctggtttgccttcgccctacaaaaatgccatgaactggcactgctgcgcgatgcgctgaacagtggtgacacggcagctctggcagagtggagcgccccgattcaggcacgtcgtcactctacccgcgtacataatccggcggtagaaaagcgtctggcggcgatcaccgcccaggacagccagcgtgcgaatgtctatgaagtgcgtgctgaagcccagcgtgcgcgttttaaactgccagcgtggccgaccaccacgattggttccttcccgcaaaccacggaaattcgtaccctgcgtctggatttcaaaaagggcaatctcgacgccaacaactaccgcacgggcattgcggaacatatcaagcaggccattgttgagcaggaacgtttgggactggatgtgctggtacatggcgaggccgagcgtaatgacatggtggaatactttggcgagcacctcgacggatttgtctttacgcaaaacggttgggtacagagctacggttcccgctgcgtgaagccaccgattgtcattggtgacattagccgcccggcaccgattaccgtggagtgggcgaagtatgcgcaaagcctgaccgacaaaccggtgaaagggatgctgacggggccggtgaccatactctgctggagcttcccgcgtgaagatgtcagccgtgaaaccatcgccaaacagattgcgctggcgctgcgtgatgaagtggccgatctggaagccgctggaattggcatcatccagattgacgaaccggcgctgcgcgaaggtttaccgctgcgtcgtagcgactgggatgcgtatctccagtggggcgtagaggccttccgtatcaacgccgccgtggcgaaagatgacacacaaatccacactcacatgtgttattgcgagttcaacgacatcatggatagcattgcggcgctggacgcagacgtcatcaccatcgaaaccagccgttccgacatggagttgctggagagctttgaagagtttgattatccaaatgaaatcggtcctggcgtctatgacattcacagcccaaacgtaccgagcgtggaatggattgaagccttgctgaagaaagcggcaaaacgcattccggcagagcgcctgtgggtcaacccggactgtggcctgaaaacgcgcggctggccagaaacccgcgcggcactggcgaacatggtgcaggcggcgcagaacttgcgtcgggggtaaaatccaaaccgggtggtaataccacccggtcttttctcattacaggctcttcttcccaccatactgcttaaaccattccagcatacgctgccagccatcttctgcagatgcggcatgatagctcgggcgataatcagcgttgaatgcatgcccggcgtccgggtacacgataatctctgctttcgcattagcagcccgcagcgcctggcgcatggtttcaacgctctcctgcggaatgctgttatcctgaccaccatataagccgagaatcggcgcgttaagatcggttgcgatatcaacaggttgtttcggactattcaggctcttgtcgcccgtcagtttgccgtaccacgccactgcggcttttagctgtggattatgcgcggcatacagccaggtgatacgtccaccccagcagaatccggtgatcattaaacgatgaacatcgccgccgttgcgggaagcccaactggcgacatgatcgagatcggccagcacctggctgtcaggcacttttgctaccagaccgctaagcaacgtggggatatcggcaaaatcattcggatcgccttcgcggaagtaaagttcaggtgcgatagccagatacccctccagcgccagacggcgacaaatgtcgcggatatgttcatgcacgccaaaaatttcctgcactacaatgaccactggcagtgggccatcgctttgctttggtctggcatggtaagcaggcatgttatccccttgactagggatagaggtgaagcccgccacaatcgcgtcgtccggggtctgaacgatggtgctagcgagagggcttgcagcaggtgcaaatccagattgttgtgttgttgccatggtattctccgtacccttataaaaatgttgcgcaatgttaactatagtcagcatgcaacaaatcacattgcctgaatcggctcatcttttatgcagtcctgcagaatgaagggtgatttatgtgatttgcatcacttttggtgggtaaatttatgcaacgcatttgcgtcatggtgatgagtatcacgaaaaaatgttaaacccttcggtaaagtgtctttttgcttcttctgactaaaccgattcacagaggagttgtatatgtccaagtctgatgtttttcatctcggcctcactaaaaacgatttacaaggggctacgcttgccatcgtccctggcgacccggatcgtgtggaaaagatcgccgcgctgatggataagccggttaagctggcatctcaccgcgaattcactacctggcgtgcagagctggatggtaaacctgttatcgtctgctctaccggtatcggcggcccgtctacctctattgctgttgaagagctggcacagctgggcattcgcaccttcctgcgtatcggtacaacgggcgctattcagccgcatattaatgtgggtgatgtcctggttaccacggcgtctgtccgtctggatggcgcgagcctgcacttcgcaccgctggaattcccggctgtcgctgatttcgaatgtacgactgcgctggttgaagctgcgaaatccattggcgcgacaactcacgttggcgtgacagcttcttctgataccttctacccaggtcaggaacgttacgatacttactctggtcgcgtagttcgtcactttaaaggttctatggaagagtggcaggcgatgggcgtaatgaactatgaaatggaatctgcaaccctgctgaccatgtgtgcaagtcagggcctgcgtgccggtatggtagcgggtgttatcgttaaccgcacccagcaagagatcccgaatgctgagacgatgaaacaaaccgaaagccatgcggtgaaaatcgtggtggaagcggcgcgtcgtctgctgtaattctcttctcctgtctgaaggccgacgcgttcggccttttgtatttttgcgtagcgcctcgcaggaaatgcctttccaactggacgtttgtacagcacaattctattttgtgcgggtaagttgttgcgtcaggaggcgttgtggatttcagtatcatggtttacgcagttattgcgttggtgggtgtggcaattggctggctgtttgccagttatcaacatgcgcagcaaaaagccgagcaattagctgaacgtgaagagatggtcgcggagttaagcgcggcaaaacaacaaattacccaaagcgagcactggcgtgcagagtgcgagttactcaataacgaagtgcgcagcctgcaaagtattaacacctctctggaggccgatctgcgtgaagtaaccacgcggatggaagccgcacagcaacatgctgacgataaaattcgccagatgattaacagcgagcagcgcctcagtgagcagtttgaaaacctcgccaaccgtatttttgagcacagcaatcgccgggttgatgagcaaaaccgtcagagtctgaacagcctgttgagcccgctacgtgaacaactggacggtttccgccgtcaggttcaggacagcttcggtaaagaagcacaagaacgccataccctgacccacgaaattcgcaatctccagcaactcaacgcgcaaatggcccaggaagcgatcaacctgacgcgcgcgctgaaaggcgacaataaaacccagggcaactggggcgaggtagtattgacgcgggtgttggaggcttccggtctgcgtgaagggtatgaatatgaaacccaggtcagcatcgaaaatgacgcccgcagccggatgcagccggatgtcatcgtgcgcctgccgcagggaaaagatgtggtgatcgacgccaaaatgacgctggtcgcctatgaacgctattttaacgccgaagacgactacacccgcgaaagcgcgctacaggaacatatcgcgagcgtgcgtaaccatatccgtttgctgggacgcaaagattatcaacagctgccggggctgcgaactctggattacgtgctgatgtttattcccgttgaacccgcttttttactggcgcttgaccgccagccggagctgatcaccgaagcgttgaaaaacaacatcatgctggttagcccgactacgctgctggtggcgctgcgcactatcgccaacctgtggcgttatgagcatcaaagccgcaacgcccagcaaatcgccgatcgtgccagcaagctgtacgacaagatgcgtttgttcatcgatgacatgtccgcgattggtcaaagtctcgacaaagcgcaggataattatcggcaggcaatgaaaaaactctctagtgggcgcggaaatgtgctggcgcaggcagaagcgtttcgcggtttaggagtagaaattaaacgcgagattaatccggatttggctgaacaggcggtgagccaggatgaagagtatcgacttcggagcgttccggagcagccgaatgatgaagcttatcaacgcgatgatgaatataatcagcagagccgctaacccattgggagtagttaagccgggtagaaatctagggcatcgacgcccaatctgttacacttctggaacaattttttgatgagcaggcattgagatggtggataagagtcaagaaacgacgcactttggttttcagaccgtcgcgaaggaacaaaaagcggatatggtcgcccacgttttccattccgtggcaagtaaatacgatgtcatgaatgatttgatgagttttggtattcatcgtttgtggaagcgattcacgattgattgcagcggcgtacgccgtgggcagaccgtgctggatctggctggtggcaccggcgacctgacagcgaaattctcccgcctggtcggagaaactggcaaagtggtccttgctgatatcaatgaatccatgctcaaaatgggccgcgagaagctgcgtaatatcggtgtgattggcaacgttgagtatgttcaggcgaacgctgaggcgctgccgttcccggataacacctttgattgcatcaccattagctttggtctgcgtaacgtcaccgacaaagataaagcactgcgtagtatgtatcgcgtgctgaaacccggcggccgcctgctggtgcttgagttcagcaagccaattatcgagccgctgagcaaagcctatgatgcatactccttccatgtgctgccgcgtattggcagtctggtcgcgaacgacgccgacagctaccgttatctggcagaatccatccgtatgcatcccgatcaggataccctgaaagccatgatgcaggatgccggattcgaaagtgtcgactactacaatctgacggcaggggttgtggcgctgcatcgtggttataagttctgacaggagaccggaaatgccttttaaacctttagtgacggcaggaattgaaagtctgctcaacaccttcctgtatcgcagtcccgcgctgaaaacggcccgcagccgtctgctgggtaaagtattgcgcgtggaggtaaaaggctttagcacgagtttgattctggtgttcagcgaacgccaggttgatgtactgggcgaatgggcaggcgatgctgactgcaccgttatcgcctacgccagtgtgttgccgaaacttcgcgatcgccagcagcttaccgcactgattcgcagtggtgagctggaagtgcagggcgatattcaggtggtgcaaaacttcgttgcgctggcagatctggcagagttcgaccctgcggaactgctggccccttataccggtgatatcgccgctgaaggaatcagcaaagccatgcgcggaggcgcaaagttcctgcatcacggcattaagcgccagcaacgttatgtggcggaagccattactgaagagtggcgtatggcacccggtccgcttgaagtggcctggtttgcggaagagacggctgccgtcgagcgtgctgttgatgccctgaccaaacggctggaaaaactggaggctaaatgacgccaggtgaagtacggcgcctatatttcatcattcgcacttttttaagctacggacttgatgaactgatccccaaaatgcgtatcaccctgccgctacggctatggcgatacagtttattctggatgccaaatcggcataaagacaaacttttaggtgagcgactacgactggccctgcaagaactggggccggtttggatcaagttcgggcaaatgttaagtacccgccgcgatctttttccaccgcatattgccgatcagctggcgttattgcaggacaaagttgctccgtttgatggcaagctggcgaagcagcagattgaagctgcaatgggcggcttgccggtagaagcgtggtttgacgattttgaaatcaagccgctggcttctgcttctatcgcccaggttcataccgcgcgattgaaaagcaatggtaaagaggtggtgattaaagtcatccgcccggatattttgccggttattaaagcggatctgaaacttatctaccgtctggctcgctgggtgccgcgtttgctgccggatggtcgccgtctgcgcccaaccgaagtggtgcgcgagtacgaaaagacattgattgatgaactgaatttgctgcgggaatctgccaacgccattcagcttcggcgcaattttgaagacagcccgatgctctacatcccggaagtttaccctgactattgtagtgaagggatgatggtgatggagcgcatttacggcattccggtgtctgatgttgcggcgctggagaaaaacggcactaacatgaaattgctggcggaacgcggcgtgcaggtgttcttcactcaggtctttcgcgacagctttttccatgccgatatgcaccctggcaacatcttcgtaagctatgaacacccggaaaacccgaaatatatcggcattgattgcgggattgttggcagcctaaacaaagaagataaacgctatctggcagaaaactttatcgccttctttaatcgcgactatcgcaaagtggcagagctacacgtcgattctggctgggtgccaccagataccaacgttgaagagttcgaatttgccattcgtacggtctgtgaacctatctttgagaaaccgctggccgaaattagctttggacatgtactgttaaatctgtttaatacggcgcgtcgcttcaatatggaagtgcagccgcaactggtgttactccagaaaaccctgctctacgtcgaaggggtaggacgccagctttatccgcaactcgatttatggaaaacggcgaagcctttcctggagagctggattaaagatcaggtcggtattcctgcgctggtgagagcatttaaagaaaaagcgccgttctgggtcgaaaaaatgccagaactgcctgaattggtttacgacagtttgcgccagggcaagtatttacagcacagtgttgataagattgcccgcgagcttcagagtaatcatgtacgtcagggacaaagccgttattttctcggaattggcgctacgttagtattaagtggcacattcttgttggtcagccgacctgaatgggggctgatgcccggctggttaatggcaggtggtctgatcgcctggtttgtcggttggcgcaaaacacgctgattttttcatcgctcaaggcgggccgtgtaacgtataatgcggctttgtttaatcatcatctaccacagaggaacatgtatgggtggtatcagtatttggcagttattgattattgccgtcatcgttgtactgctttttggcaccaaaaagctcggctccatcggttccgatcttggtgcgagcatcaaaggctttaaaaaagcaatgagcgatgatgaaccaaagcaggataaaaccagtcaggatgctgattttactgcgaaaactatcgccgataagcaggcggatacgaatcaggaacaggctaaaacagaagacgcgaagcgccacgataaagagcaggtgtaatccgtgtttgatatcggttttagcgaactgctattggtgttcatcatcggcctcgtcgttctggggccgcaacgactgcctgtggcggtaaaaacggtagcgggctggattcgcgcgttgcgtagtctggcgacaacggtgcagaacgaactgacccaggagttaaaactccaggagtttcaggacagtctgaaaaaggttgaaaaggcgagcctcactaacctgacgcccgaactgaaagcgagcatggatgaactacgccaggccgcggagagcatgaagcgttcctacgttgcaaacgatcctgaaaaggcgagcgatgaagcgcacaccatccataacccggtggtgaaagataatgaagctgcgcatgagggcgtaacgcctgccgctgcacaaacgcaggccagtagcccggaacagaagccagaaaccacgccagagccggtggtaaaacctgctgcggacgctgaaccgaaaaccgctgcaccttcccctagcagcagtgataaaccgtaaacatgtctgtagaagatactcaaccgcttatcacgcatctgattgagctgcgtaagcgtctgctgaactgcattatcgcggtgatcgtgatattcctgtgtctggtctatttcgccaatgacatctatcacctggtatccgcgccattgatcaagcagttgccgcaaggtagtacgatgatcgccaccgacgtggccagcccgttctttacgccgatcaagctgacctttatggtgagcctgattctgagtgcgccggtgattctctatcaggtgtgggcatttatcgccccagcgctgtataagcatgaacgtcgcctggtggtgccgctgctggtttccagctctctgctgttttatatcggcatggcattcgcctactttgtggtctttccgctggcatttggcttccttgccaataccgcgccggaaggggtgcaggtatccaccgacatcgccagctatttaagcttcgttatggcgctgtttatggcgtttggtgtctcctttgaagtgccggtagcaattgtgctgctgtgctggatggggattaccagcccagaagacttacgcaaaaaacgcccgtatgtgctggttggtgcattcgttgtcgggatgttgctgacgccgccggatgtcttcagccaaacgctgttggcgatcccgatgtactgtctgtttgaaatcggtgtcttcttcagtcgcttttacgttggtaaagggcgaaatcgggaagaggaaaacgacgctgaagcagaaagcgaaaaaactgaagaataaattcaaccgcccgtcagggcggttgtcatatggagtacaggatgtttgatatcggcgttaatttgaccagtagccaatttgcgaaagaccgtgatgatgttgtagcgtgcgcttttgacgcgggagttaatgggctactcatcaccggcactaacctgcgtgaaagccagcaggcgcaaaagctggcgcgtcagtatagctcctgttggagtacggcgggcgtacatcctcacgacagcagccagtggcaagctgcgactgaagaagcgattattgagctggccgcgcagccagaagtggtggcgattggtgaatgtggtctcgactttaaccgcaactttagcacgccggaagagcaggaacgcgcttttgttgcccagctacgcattgccgcagatttaaacatgccggtatttatgcactgtcgcgatgcccacgagcggtttatgacattgctggagccgtggctggataaactgcctggtgcggttcttcattgctttaccggcacacgcgaagagatgcaggcgtgcgtggcgcatggaatttatatcggcattaccggttgggtttgcgatgaacgacgcggactggagctgcgggaacttttgccgttgattccggcggaaaaattactgatcgaaactgatgcgccgtatctgctccctcgcgatctcacgccaaagccaagttcccggcgcaacgagccagcccatctgccccatattttgcaacgtattgcgcactggcgtggagaagatgccgcatggctggctgccaccacggatgctaatgtcaaaacactgtttgggattgcgttttaaagtttgcggaactcggtattcttcacactgtgcttaatctctttattaataagattaagcaatagcatggagcgagcctcaccatcgggttcggtgaaaatggcctgaaagccttcgaacgcgccttcggtaataatcaccttatcacccggataaggggttgccggatcgacaatgtctttcggtttatatacgcttagctgatgaataaccgcgcttgggactatcgctgggctcgcgccaaagcgcacgaagtggctgacaccgcgggtcgcgttgatagtcgtggtatgaatcacttctgggtcaaattccacaaacaggtagttggggaacaatggctcactgactgcagtacgttttccacgcacgattttttccagggtgatcatcggtgccaggcaattcacagcctgtctttcgaggtgttcctgggcacgttgaagttgcccgcgcttgcagtacagtaaataccaggattgcataatgactcttatccgtttaatcggggcgcaaggatagcaaaagctttacgctaagttaattatattccccggtttgcgttataccgtcagagttcacgctaatttaacaaatttacagcatcgcaaagatgaacgccgtataatgggcgcagattaagaggctacaatggacgccatgaaatataacgatttacgcgacttcttgacgctgcttgaacagcagggtgagctaaaacgtatcacgctcccggtggatccgcatctggaaatcactgaaattgctgaccgcactttgcgtgccggtgggcctgcgctgttgttcgaaaaccctaaaggctacagtatgccggtgctgtgcaacctgttcggtacgccaaagcgcgtggcgatgggcatggggcaggaagatgttagcgcgctgcgtgaagttggtaaattattggcgtttctgaaagagccggagccgccaaaaggtttccgcgacctgtttgataaactgccgcagtttaagcaagtattgaacatgccgacaaagcggctgcgtggtgcgccctgccaacaaaaaatcgtctctggcgatgacgtcgatctcaatcgcattcccattatgacctgctggccggaagatgccgcgccgctgattacctgggggctgacagtgacgcgcggcccacataaagagcggcagaatctgggcatttatcgccagcagctgattggtaaaaacaaactgattatgcgctggctgagccatcgcggcggcgcgctggattatcaggagtggtgtgcggcgcatccgggcgaacgtttcccggtttctgtggcgctgggtgccgatcccgccacgattctcggtgcagtcactcccgttccggatacgcttagtgagtatgcgtttgccggattgctacgtggcaccaagaccgaagtggtgaagtgtatctccaatgatcttgaagtgcccgccagtgcggagattgtgctggaagggtatatcgaacaaggcgaaactgcgccggaagggccgtatggcgaccacaccggttactataatgaagtcgatagtttcccggtatttaccgtgacgcatattacccagcgtgaagatgcgatttaccattccacctataccgggcgtccgccagatgagcccgcggtgctgggtgtcgcactgaacgaagtgtttgtgccgattctgcaaaaacagttcccggaaattgtcgatttttacctgccgccggaaggctgctcttatcgcctggcggtagtgacaatcaaaaaacagtacgccggacacgcgaagcgcgtcatgatgggcgtctggagcttcttacgccagtttatgtacactaaatttgtgatcgtttgcgatgatgacgttaacgcacgcgactggaacgatgtgatttgggcgattaccacccgtatggacccggcgcgggatactgttctggtagaaaatacgcctattgattatctggattttgccagccctgtctccgggctgggtagtaaaatggggctggatgccacgaataaatggccgggggaaacccagcgtgaatggggacgtcccatcaaaaaagatccagatgttgtcgcgcatattgacgccatctgggatgaactggctatttttaacaacggtaaaagcgcctgatgcgcgtttgttttgccctatttatcgatccgacagagaaagcgcatgacaaccttaagctgtaaagtgaccagcgtagaagctatcacggataccgtatatcgtgtccgcatcgtgccagacgcggccttttcttttcgtgctggtcagtatttgatggtagtgatggatgagcgcgacaaacgtccgttcagtatggctagcacgccggatgaaaaagggtttatcgagctgcatattggcgcttctgaaatcaacctttacgcgaaagcagtcatggaccgcatcctcaaagatcatcaaatcgtggtcgacattccccacggagaagcgtggctgcgcgatgatgaagagcgtccgatgattttgattgcgggcggcaccgggttctcttatgcccgcagcattttgctgacagcgttggcgcgtaacccaaaccgtgatatcaccatttactggggcgggcgtgaagagcagcatctgtatgatctctgcgagcttgaggcgcttagcttgaagcatcctggtctgcaagtggtgccggtggttgaacaaccggaagcgggctggcgtgggcgtactggcaccgtgttaacggcggtattgcaggatcacggtacgctggcagagcatgatatctatattgccggacgttttgagatggcgaaaattgcccgcgatctgttttgcagtgagcgtaatgcgcgggaagatcgcctgtttggcgatgcgtttgcatttatctgagatataaaaaaacccgcccctgacaggcgggaagaacggcaactaaactgttattcagtggcatttagatctatgacgtatctggcaaaccatgcccgatgcgacgctgtcgcgtcttatcgtgcctacaaatagtccgaaccgtaggccggataaggcgtttacgccgcatccggcaattggtgcatgatgcctgatgcgacgctgtcgcgtcttatcgtgcctacaaatagtccgaaccgtaggccggataaggcgtttacgccgcatccggcaattggtgcatgatgcctgatgcgacgctggcgcgtcttatcaggcctacattggtgccggatcggtagaccggataaggcgttcacgccgcatccggcaagtggttaaacccgctcaaacaccgtcgcaataccctgacccagaccgatacacatcgtcgccagaccaaactgaacgtctttgcgttccatcagattcagcagcgtggtgctgatacgcgcaccggaacaacccagcggatgacccagcgcgatcgcgccaccgttgaggttgatcttctcgtcaatctgctcaattagtcccagatctttaatacatggcaggatctgcgcggcaaaggcttcgttcatttcaaacacgccgatatcgctggcagaaagccccgcttttttcagcgccagtttgctggccggaaccgggccgtaacccataatgcttgggtcacaaccaacgaccgccatgctacgcacacgagcgcgcggcttaagacctaattcatgggcgcggctttcactcatcaccagcatggcagctgcgccatcggaaagtgcagaagatgtgcccgccgttaccataccgtttactggatcaaacgccggacgcagcgtggcgagggcttccacggtggtttccgggcgaatcacttcgtcgtaattaaactgcttcaggacgccgtcggcatcgtgaccaccggtcgggatgatttcatttttaaatgcggcgctctgcgtggcggcccaggcgcgggcgtgactccgcgcggcaaaggcatcctgcatttcacggctgataccgtgcatacgcgccagcatttctgccgttaagcccatcatgcccgccgctttggcgacattgcggctcaggccggggtgaaaatcgacgccgtgactcatcggcacatggcccatatgctccacgccgccaaccagacatgcctgcgcatcgccagtcatgatcattcgtgctgcgtcatgcagtgcctgcatggaactaccacacaagcgattaacggtaaccgccgggacagagtgtggtacttctgccagcagcgccgcgttacgggcgatattaaaaccctgctccagcgtctgctgcacacaaccccagtaaatatcgtcgagggccgccgcttccagcgccgggttacgcgccagcaggctacgcattaaatgagcggagagatcttctgcacgcacgttacgaaaagcaccgcccttgctacggcccatcggggtgcgaattgcatcgacaatgacaacctgttccattgtgactccttaagccgttttcaggtcgccaaccggacgggctggctcaaccggaggatagtacggttcgttatgacgcgctttattacgcagaccttccggcacttcatacagcgggccgaggtgctgatattgctgtgccatatcgaggtattttgcgctaccgagggtgtccagccagcggaacgcgccgccgtggaacggagggaagcccaggccgtagaccagcgccatatccgcttccgccggagtggcgataatgccttcctccagacagcgcaccacttcgttgaccatcgggatcatcatgcgggcgataatctcttcttcgctgaagtcgcgcttcggctggctcacttctgccagcaggtcttcaacggcggcgtcttcttctttcttcggcttacctttgctgtcttctttataacgccagaaaccgaggccgttcttctgaccaaagcggttggcatcaaacagcgcgtcgatggcatcgcggtaatctttctgcatccgctgcgggaagcctgctgccatgacagcctgagcgtgatgcgcggtatcaatgcccacaacgtccagcagatatgccgggcccatcggccagccaaactgtttttccatcactttgtcgatcttgcggaaatccgcgccgtcgcgcagcagctggctgaaaccggcgaaatacgggaacagcacgcggttaacaaagaagccggggcagtcgttaaccacaatcggcgtcttgcccatcttgctcgcccaggcgacaactttcgcgatggtttcgtcggagcttttctcgccgcgaataatttctaccaacggcattcggtggaccgggttaaagaagtgcatcccgcagaagttttccgggcgttccagcgcgttggccagttcgctgataggaatggtactagtgttagacgccagcacggtatcctggcgtactttttgttcggtttctgccagtacggcttttttcactttcgggttttcaacaaccgcttctaccacaatatccacgcggtcaaatccggcgtagtcgagcgttgggtggattgtggagatcacgccagccagtttcagaccatcgatcttgccgcgctcaagctgcttgttcagcagtttcgcggcttcggtcatgccgagggttaagctcttgtcgttgatatctttcatgacaaccggcacgcctttccacgcagactggtaagcgatgccgccgcccataatgcctgcacccagcaccgcggcctgtttcggggtttcaacgtctttggtgagtttcttcgctttgccttttacatattgatcgttaaggaaaatgccgaccagtgcgcgggcttcgttggtatgcgccagcgggacaaaacttttgttttccaggtttaaggcttcttcacgaccaaaacgggccgcagcttcaatggtttttactgcggtgatgggggccggataatgtttccccgctgtttgtgcgaccatccctttagcgatggtgaagctcatggtggcttcaatcttgctcagttttagtggttccagcttcggctgacgttttgctttccagtcgaggtcgccgttaatggcctggcgtaaaaccgcctttgcgccttcaaccagtttttctgctttgactacgccatccaccagaccgattttcagcgcctgatccgcgccgacatctttaccggcggcaatgatttccagcgcactgtcagcgcccagcatacgtggcatacgtacagaaccgccaaagccaggcatgatgcccagtttggtttccggcagaccgatgcgcagatccggcgtcgccagacgataatcggtcgccagcacgcattcgcagccaccgcccagcgcatagccattgacggcagcaatggtcggcaccggcagatcttccaggcgattaaacacgctattggcaaagtgcagccactgacttaactgttcttcaggaacgaggaacagggacaaaaattcggtgatatcagcaccgacgataaaggctgctttgttgctacgcagcagcagcccttttagatcactttgctgttccagcacgccgatggcctcgccgaggctggcgacggtcgcagtgtcgagtttattaacactacctggggcatcaaataccagttcggcaatgccatcttccagccagtcaaggtacagggtgtcgcctttgtaaagcatgtcagtctcctgaatccgcaaggtgatctggtcgtaccagatgagtcgaagtgtgtattttgtgttaaaaatatgcaaacaaaagattaaagaaatgccgatctgatcacgctcggcagaaatcacgctctggatgaacgatgtgctaagatgcggagacttaaggtcaaaaaaacagaagggtaaaaaatggaaagtctggccagcctctataaaaatcatatagctaccttacaagaacggactcgcgatgcgctggcgcgcttcaagctggatgcgttacttattcactccggcgagctgttcaatgtttttctcgacgatcatccctatccgtttaaagtgaacccgcaattcaaagcgtgggtgccggtaactcaggtgccaaactgctggttgctggtggatggcgtgaacaagccgaaactgtggttctatctgccggttgattactggcacaacgtcgaaccgctgccgacctctttctggactgaagatgtggaagtgatcgcgctgccgaaagccgatggcattggtagcctgctgcctgctgcgcgcggcaatatcggttatatcggtccggtgccggaacgtgcgctgcaactgggtattgaggccagcaacatcaacccgaaaggggttatcgactacctgcattactatcgctccttcaaaactgagtacgaactggcctgtatgcgtgaagcgcagaaaatggcggtcaacggtcaccgcgcggcagaagaagcgttccgttctggcatgagcgagttcgatatcaacattgcctatctgaccgcgaccggtcatcgtgataccgacgtaccttacagcaacattgtggcgcttaacgaacacgctgcggtactgcattacaccaaactggaccatcaggcaccggaagagatgcgcagcttcctgctggatgccggggcagaatataacggctatgcggctgacctgacccgtacctggagcgcaaaaagtgacaacgactacgcgcagctggtgaaggacgttaatgatgaacaactggcgctgatcgccaccatgaaagcaggcgtcagctatgtggattaccacatccagttccatcagcgcatcgccaaactgctgcgtaaacatcaaatcatcaccgatatgagtgaagaagcgatggtcgaaaacgatcttaccgggccgtttatgccgcatggtatcggccatccgctgggcctgcaggtgcatgacgtcgctggttttatgcaggatgatagcggtacgcacctcgcggcaccggcaaaatatccgtacctgcgctgcacccgtattctccagccgggcatggtgttaaccatcgaaccgggtatctacttcatcgaaagcctactggcaccgtggcgtgaagggcagttcagcaagcacttcaactggcagaaaattgaagcactgaaaccgttcggcggcattcgtatcgaagacaacgtggtgatccacgaaaacaacgtggaaaacatgacccgggatctgaaactggcgtgatggaaagctggttaattcctgcggcaccggtcacggtcgttgaagagatcaaaaagagccgcttcataacgatgttggcgcataccgatggcgttgaggcggcgaaagcgtttgttgaaagcgtgcgggcagaacaccccgatgcccggcaccattgcgtggcgtgggtcgcgggtgcgccggatgattctcaacagctgggtttctctgacgacggggagccggcgggaacggcaggtaaaccgatgctcgcccagctaatgggcagcggcgtcggggaaattaccgctgtggtagtgcgctactacggcggcatattgcttggcaccggtgggttagtgaaagcgtatggcggcggcgtgaatcaggcgctgcgccagctaacgacccaacgcaagacgccattaaccgaatatactttgcaatgtgaatatcatcagttaaccggcattgaagcgttgctggggcagtgtgacggcaaaattatcaacagtgattatcaggcattcgttctgctgcgggtggcgcttccggcggcgaaagtggctgaattttccgcaaagctggcggattttagccgtggtagtttgcaattgttagcgattgaagaataatccccacttcgttttgcagaactaaggaagcggcagagatgcattttcgcgccattacccgaatcgttggactactggtcatcttatttagtgggaccatgattatccctgggctggtagcactcatctaccgggatggagcgggccgcgcttttacccagaccttttttgtcgccctcgccattggctctatgctgtggtggccgaaccgcaaagagaaaggcgaacttaaatcccgtgaggggtttctgatagtggtgctgttctggaccgtgctgggtagcgtcggtgcgctcccttttatcttcagcgaaagcccgaacctcacgattaccgatgcgttttttgaatctttctctggcctgaccactacgggagccactacgctggtggggctggatagcctccctcacgccatcctcttttatcgccagatgctgcaatggtttggcgggatggggatcatcgtgttggcggttgcgatactgcctatcctcggcgtgggtgggatgcagctctatcgcgcagaaatgcccggcccgctgaaagataacaaaatgcgcccgcgaattgcggaaacggcgaaaaccctgtggttgatttatgtcttgctgaccgtcgcctgtgcgctggcgttgtggtttgccggaatggatgcctttgatgccatcggccatagctttgcgactatcgctattggcggcttcagcacacatgatgccagtatcggttatttcgatagcccgactattaacactatcattgctatcttcctgctgatctccggctgtaactacggtctgcactttagtctgttaagtgggcgtagtctgaaggtttattggcgcgatccggaatttcgcatgtttatcggcgtacagtttacgctggtggttatttgtaccctcgtactgtggtttcataatgtctacagtagcgcgctgatgacaattaaccaggcgtttttccaggtggtgagcatggcgacaaccgccgggtttacaactgacagcattgcccgctggccgctctttttgccggtactgcttttatgtagtgcctttatcggcggttgcgccgggagtacgggcggtggcctgaaggtgatccgcatcctgctgctgtttaagcaggggaaccgtgagctgaaacgactggtgcatccgaacgccgtctatagcattaagctggggaatcgcgcactgccggaacgtatcctcgaagccgtttggggatttttctccgcctatgcattggtgtttattgtcagtatgctggcgattatcgccacgggcgtggatgacttttctgcctttgcgagcgttgttgcgacattgaataacctggggccagggcttggcgtggttgctgataactttaccagtatgaacccggtggctaaatggatcctgattgccaacatgctgtttggtcgtctcgaggtctttacattgctggtgctctttaccccgactttctggcgtgaatgatggagtaatacgtgaaaacattaattcttttcagtacaagggacggacaaacgcgcgagattgcctcctacctggctagcgaactgaaagaactggggatccaggcggatgtcgccaatgtgcaccgcattgaagaaccacagtgggaaaactatgaccgtgtggtcattggtgcttctattcgctatggtcactaccatagtgcgttccaggaatttgtcaaaaaacatgcgacgcggctgaatagcatgccgagcgccttttactccgtgaatctggtggcgcgcaaaccggagaagcgtactccacagaccaacagctacgcgcgcaagtttctgatgaacagccaatggcgtcccgatcgctgcgcggtcattgccggggcgctgcgttacccacgttatcgctggtacgaccgttttatgatcaagctgattatgaagatgagtggcggtgaaacggatacgcgcaaagaagttgtctataccgattgggagcaggtggcgaatttcgcccgagaaatcgcccatttaaccgacaaaccgacgctgaaataagcataaagaataaaaaatgcgcggtcagaaaattattttaaatttcctcttgtcaggccggaataactccctataatgcgccaccactgacacggaacaacggcaaacacgccgccgggtcagcggggttctcctgagaactccggcagagaaagcaaaaataaatgcttgactctgtagcgggaaggcgtattatgcacaccccgcgccgctgagaaaaagcgaagcggcactgctctttaacaatttatcagacaatctgtgtgggcactcgaagatacggattcttaacgtcgcaagacgaaaaatgaataccaagtctcaagagtgaacacgtaattcattacgaagtttaattctttgagcgtcaaacttttaaattgaagagtttgatcatggctcagattgaacgctggcggcaggcctaacacatgcaagtcgaacggtaacaggaagaagcttgcttctttgctgacgagtggcggacgggtgagtaatgtctgggaaactgcctgatggagggggataactactggaaacggtagctaataccgcataacgtcgcaagaccaaagaggggtaccttcgggcctcttgccatcggatgtgcccagatgggattagctagtaggtggggtaacggctcacctaggcgacgatccctagctggtctgagaggatgaccagccacactggaactgagacacggtccagactcctacgggaggcagcagtggggaatattgcacaatgggcgcaagcctgatgcagccatgccgcgtgtatgaagaaggccttcgggttgtaaagtactttcagcggggaggaagggagtaaagttaatacctttgctcattgacgttacccgcagaagaagcaccggctaactccgtgccagcagccgcggtaatacggagggtgcaagcgttaatcggaattactgggcgtaaagcgcacgcaggcggtttgttaagtcagatgtgaaatccccgggctcaacctgggaactgcatctgatactggcaagcttgagtctcgtagaggggggtagaattccaggtgtagcggtgaaatgcgtagagatctggaggaataccggtggcgaaggcggccccctggacgaagactgacgctcaggtgcgaaagcgtggggagcaaacaggattagataccctggtagtccacgccgtaaacgatgtcgacttggaggttgtgcccttgaggcgtggcttccggagctaacgcgttaagtcgaccgcctggggagtacggccgcaaggttaaaactcaaatgaattgacgggggcccgcacaagcggtggagcatgtggtttaattcgatgcaacgcgaagaaccttacctggtcttgacatccacggaagttttcagagatgagaatgtgccttcgggaaccgtgagacaggtgctgcatggctgtcgtcagctcgtgttgtgaaatgttgggttaagtcccgcaacgagcgcaacccttatcctttgttgccagcggtccggccgggaactcaaaggagactgccagtgataaactggaggaaggtggggatgacgtcaagtcatcatggcccttacgaccagggctacacacgtgctacaatggcgcatacaaagagaagcgacctcgcgagagcaagcggacctcataaagtgcgtcgtagtccggattggagtctgcaactcgactccatgaagtcggaatcgctagtaatcgtggatcagaatgccacggtgaatacgttcccgggccttgtacacaccgcccgtcacaccatgggagtgggttgcaaaagaagtaggtagcttaaccttcgggagggcgcttaccactttgtgattcatgactggggtgaagtcgtaacaaggtaaccgtaggggaacctgcggttggatcacctccttaccttaaagaagcgttctttgaagtgctcacacagattgtctgatgaaaatgagcagtaaaacctctacaggcttgtagctcaggtggttagagcgcacccctgataagggtgaggtcggtggttcaagtccactcaggcctaccaaatttgcacggcaaatttgaagaggttttaactacatgttatggggctatagctcagctgggagagcgcctgctttgcacgcaggaggtctgcggttcgatcccgcatagctccaccatctctgtagtgattaaataaaaaatacttcagagtgtacctgcaaaggttcactgcgaagttttgctctttaaaaatctggatcaagctgaaaattgaaacactgaacaacgaaagttgttcgtgagtctctcaaattttcgcaacacgatgatgaatcgaaagaaacatcttcgggttgtgaggttaagcgactaagcgtacacggtggatgccctggcagtcagaggcgatgaaggacgtgctaatctgcgataagcgtcggtaaggtgatatgaaccgttataaccggcgatttccgaatggggaaacccagtgtgtttcgacacactatcattaactgaatccataggttaatgaggcgaaccgggggaactgaaacatctaagtaccccgaggaaaagaaatcaaccgagattcccccagtagcggcgagcgaacggggagcagcccagagcctgaatcagtgtgtgtgttagtggaagcgtctggaaaggcgtgcgatacagggtgacagccccgtacacaaaaatgcacatgctgtgagctcgatgagtagggcgggacacgtggtatcctgtctgaatatggggggaccatcctccaaggctaaatactcctgactgaccgatagtgaaccagtaccgtgagggaaaggcgaaaagaaccccggcgaggggagtgaaaaagaacctgaaaccgtgtacgtacaagcagtgggagcacgcttaggcgtgtgactgcgtaccttttgtataatgggtcagcgacttatattctgtagcaaggttaaccgaataggggagccgaagggaaaccgagtcttaactgggcgttaagttgcagggtatagacccgaaacccggtgatctagccatgggcaggttgaaggttgggtaacactaactggaggaccgaaccgactaatgttgaaaaattagcggatgacttgtggctgggggtgaaaggccaatcaaaccgggagatagctggttctccccgaaagctatttaggtagcgcctcgtgaattcatctccgggggtagagcactgtttcggcaagggggtcatcccgacttaccaacccgatgcaaactgcgaataccggagaatgttatcacgggagacacacggcgggtgctaacgtccgtcgtgaagagggaaacaacccagaccgccagctaaggtcccaaagtcatggttaagtgggaaacgatgtgggaaggcccagacagccaggatgttggcttagaagcagccatcatttaaagaaagcgtaatagctcactggtcgagtcggcctgcgcggaagatgtaacggggctaaaccatgcaccgaagctgcggcagcgacactatgtgttgttgggtaggggagcgttctgtaagcctgtgaaggtgtgctgtgaggcatgctggaggtatcagaagtgcgaatgctgacataagtaacgataaagcgggtgaaaagcccgctcgccggaagaccaagggttcctgtccaacgttaatcggggcagggtgagtcgacccctaaggcgaggccgaaaggcgtagtcgatgggaaacaggttaatattcctgtacttggtgttactgcgaaggggggacggagaaggctatgttggccgggcgacggttgtcccggtttaagcgtgtaggctggttttccaggcaaatccggaaaatcaaggctgaggcgtgatgacgaggcactacggtgctgaagcaacaaatgccctgcttccaggaaaagcctctaagcatcaggtaacatcaaatcgtaccccaaaccgacacaggtggtcaggtagagaataccaaggcgcttgagagaactcgggtgaaggaactaggcaaaatggtgccgtaacttcgggagaaggcacgctgatatgtaggtgaagcgacttgctcgtggagctgaaatcagtcgaagataccagctggctgcaactgtttattaaaaacacagcactgtgcaaacacgaaagtggacgtatacggtgtgacgcctgcccggtgccggaaggttaattgatggggttagccgcaaggcgaagctcttgatcgaagccccggtaaacggcggccgtaactataacggtcctaaggtagcgaaattccttgtcgggtaagttccgacctgcacgaatggcgtaatgatggccaggctgtctccacccgagactcagtgaaattgaactcgctgtgaagatgcagtgtacccgcggcaagacggaaagaccccgtgaacctttactatagcttgacactgaacattgagccttgatgtgtaggataggtgggaggctttgaagtgtggacgccagtctgcatggagccgaccttgaaataccaccctttaatgtttgatgttctaacgttgacccgtaatccgggttgcggacagtgtctggtgggtagtttgactggggcggtctcctcctaaagagtaacggaggagcacgaaggttggctaatcctggtcggacatcaggaggttagtgcaatggcataagccagcttgactgcgagcgtgacggcgcgagcaggtgcgaaagcaggtcatagtgatccggtggttctgaatggaagggccatcgctcaacggataaaaggtactccggggataacaggctgataccgcccaagagttcatatcgacggcggtgtttggcacctcgatgtcggctcatcacatcctggggctgaagtaggtcccaagggtatggctgttcgccatttaaagtggtacgcgagctgggtttagaacgtcgtgagacagttcggtccctatctgccgtgggcgctggagaactgaggggggctgctcctagtacgagaggaccggagtggacgcatcactggtgttcgggttgtcatgccaatggcactgcccggtagctaaatgcggaagagataagtgctgaaagcatctaagcacgaaacttgccccgagatgagttctccctgactccttgagagtcctgaaggaacgttgaagacgacgacgttgataggccgggtgtgtaagcgcagcgatgcgttgagctaaccggtactaatgaaccgtgaggcttaaccttacaacgccgaaggtgttttggcggattgagagaagattttcagcctgatacagattaaatcagaacgcagaagcggtctgataaaacagaatttgcctggcggcagtagcgcggtggtcccacctgaccccatgccgaactcagaagtgaaacgccgtagcgccgatggtagtgtggggtctccccatgcgagagtagggaactgccaggcatcaaataaaacgaaaggctcagtcggaagactgggcctttcgttttatctgttgtttgtcggtgaacgctctcctgagtaggacaaatccgccgggagcggatttgaacgttgcgaagcaacggcccggagggtggcgggcaggacgcccgccataaactgccaggcatcaaattaagcagaaggccatcctgacggatggcctttttgcattggcgcagaaaaaaatgccggatgcgacgctggcgcgtcttatccagcctactcttgcttatccgttctgcttttgcatccactccaccacaaaatcagccagcccctcaacatcattaatatccagtaatgcgacatcaagattaagcggcacatcactggctacagcaataacatgcctgtctatcactaattcttcaggtcgatgtccggctccatcgcgaaacagcacaatctttgcgatctcttcatgcttaaacccttcgaccagaatcaaatccagcttactggtatccattcgacttgcgagaaactgtagatccagctcttcttcgtctggtgtttccgtcatcaaggcccatcgttgctggctggcaacgatggtttgtaccgcgccagccttgcgcagctcatagctatctttgcctggcttatcaacatccatatcatggtgcgtatgcttaatcagccctggacggatccctctggcgcataatgccgggatcagttttttcaaaagcgtagtttttccggtaccactccacgcggcaaaggcgagtaacggtatcatcgtttttcctgccatcgggcaagctcctctggcgtattcacgttaacaaatgcatctttatgatcgctgaaatcaaccgcatgaccgccagccagacgcataaataccattacccggcgttctcctgcttgcagatattccagtaataaaggctcaatagcgcggtttaccagagcaatagtcgggtgatcgcgttcaccgtcatggacccacacgacaggcgcatctttgcgctgatgattaagcctggctgctaaatcagggggaatgtaaggcgtatcgcacgggcaaaacaaaaaccactcaccagcttcctgctgcattacactaagcattcctgccagagggcctgggtaatccgccagactatcttcaatcactttcagaccgcttgcctgatagatttcctgatgacgattagcattaaccacgacgtgagagagctgcgtcataagcgcgtcagcgacatgttgccataatggtttgccgtttaattcaagcaatcctttatctacgccgcccattcgtctggctttaccgcctgccagcacaacgcctgttatcgtcgtcatcagattcaccgatatcgcctcttttattgtgggattgaccctgctaacgtgtctgtctcaagagtaaggagcatcactatgaaatgtaaacgtctgaatgaagttattgaactcctccagccagcctggcaaaaagagccagaccttaacctgctgcaatttttgcagaaactggcgaaagagagtggttttgacggcgaactggcggatttgacggatgacattctgatctatcacctgaaaatgcgtgattccgcgaaagatgcggtgatcccgggtttgcagaaagattatgaagaagacttcaaaacggcgctgttacgcgctcgcggcgtaattaaagagtaaaagcttgtaagcggcgccaccaaaatcatcgtgaaatgatatccttcgtcattcgtaatgttttccggatgatgggatgaataacagcgcttttactttccagacactacacccggataccatcatggacgctctgtttgagcatgggatccgggtggattccggtcttaccccgcttaacagctatgaaaaccgtgtctatcaatttcaggacgaagatcgtcgacgttttgtcgtcaaattttatcgccctgaacgttggacagccgatcaaatcctcgaagaacatcaatttgcgttgcagctggtaaatgatgaagttccggtcgcagcacctgtggcctttaacggtcagactttattgaatcatcagggattttatttcgctgtttttccaagcgtcggtggtcgccagttcgaagctgataatatcgatcagatggaagcggttgggcgttatttagggcgtatgcaccagacggggcgcaaacagctttttatccatcgcccgaccatcggtttgaacgaatatctcattgagccacgcaagctgtttgaggacgctacactgataccttccgggttgaaagcggcattcctgaaagcgacagatgagctgattgccgccgttacagcacactggcgggaagatttcaccgttctgcggctacatggagactgccacgccgggaatattctctggcgcgatggtccaatgtttgttgatctggatgatgcacgtaatggtccagccgttcaggatttgtggatgttgctcaatggcgataaagccgagcagcggatgcaactggaaactattattgaagcttatgaagaatttagcgagttcgacaccgctgaaatcggactgattgaacctttacgcgccatgcgtttggtttattatcttgcctggctaatgcggcgttgggctgatcccgcgttcccgaaaaatttcccgtggttaaccggggaagattactggctgcgacagacggcgacttttatagaacaggcaaaagttctacaagaaccccctttgcaattaacacctatgtattaatcggagagagtagatcatgaaaaagatttggctggcgctggctggtttagttttagcgtttagcgcaagcgcggcgcagtatgaagatggtaaacagtacactaccctggaaaaaccggtagctggcgcgccgcaagtgctggagtttttctctttcttctgcccgcactgctatcagtttgaagaagttctgcatatttctgataatgtgaagaaaaaactgccggaaggcgtgaagatgactaaataccacgtcaacttcatgggtggtgacctgggcaaagatctgactcaggcatgggctgtggcgatggcgctgggcgtggaagacaaagtgactgttccgctgtttgaaggcgtacagaaaacccagaccattcgttctgcttctgatatccgcgatgtatttatcaacgcaggtattaaaggtgaagagtacgacgcggcgtggaacagcttcgtggtgaaatctctggtcgctcagcaggaaaaagctgcagctgacgtgcaattgcgtggcgttccggcgatgtttgttaacggtaaatatcagctgaatccgcagggtatggataccagcaatatggatgtttttgttcagcagtatgctgatacagtgaaatatctgtccgagaaaaaataattcaatgtaaattacataaagcccgtgaatattcacgggctttttttattatttaataaatataaatacattctgataatgcatcctgccgctggacattatttcagcataagtggatattcaaagttttgctgttttatcagggaatatttatatgatacgtaagagtgctacaggtgttattgttgcgttagccgtaatctggggtggtggcacatggtacacaggtacgcaaattcagcctggtgtcgaaaaatttattaaagattttaacgatgctaaaaagaaaggtgaacatgcctacgatatgacgttaagttatcaaaattttgacaaaggcttttttaattcccgttttcaaatgcaaatgacattcgataacggtgcacccgatctcaatatcaagccaggccagaaagttgtatttgatgtggatgttgagcacggtccgttgcccatcacaatgttaatgcatggtaatgtcatcccagcactggcagcggcaaaagtgaacttagtgaataatgaactgacacaaccgctatttatcgccgcgaaaaataaaagccccgtggaagcgacattgcgattcgcgtttggtggcagtttctctacgacattagatgttgcccctgcagagtatggaaagttttcttttggtgagggccagtttacttttaatggtgatggtagtagtttgtctaacctggatattgaaggcaaagtcgaagatattgttctgcaattaagtccaatgaacaaagtaacggcaaaaagttttaccattgattctctggcgcgattagaagaaaagaaatttccggttggtgaaagcgagagcaaatttaatcagattaacattatcaatcacggggaagacgttgcccaaatcgatgctttcgttgcaaaaaccaggctggatcgcgttaaagacaaagattatatcaatgtcaatctcacctacgaacttgataagttaacaaaagggaatcagcaactcggtagtggtgagtggagtttgattgctgaatctattgatcccagtgcagtgcgccaatttatcatccagtataacattgcgatgcagaagcagcttgctgcacaccctgagttagcaaacgatgaagttgctctgcaagaagtgaatgctgcattgttcaaagagtatttaccgttattacaaaaaagtgagccgaccattaaacaaccggtaagatggaagaacgcactcggcgaactaaatgccaatctggatatcagtattgccgacccagccaaatctagtagttccacaaacaaagatatcaaaagcctcaattttgatgtgaagttaccgcttaatgtcgtcacagaaaccgcaaaacagcttaatttatctgaaggaatggatgcggaaaaagcgcaaaagcaggctgataaacaaatcagcgggatgatgacattaggtcagatgtttcagttaatcacgattgacaacaataccgccagcctgcagctgcgttatacaccgggtaaagttgtttttaacggacaggagatgagcgaagaagaatttatgtctcgtgccggacgttttgttcattaaaatactcactcgcctctgctcattcagaggcgagtaaaacttacttattctgacgctgactactcatgagagacgtcagaagccggtctttttcctgccacaaactgttcagccattgctgaaaatggcgcttaaagcttttgtcattgatgtagtcgccatgtaactcatcggcaataggctgtaaatccacatgtacgacaatccgcgtcagtttaccgcttaacatatcgaagaacggctgacggttattgtccggataacacagcgtaacattaagcagtttatcgaattgtttacccagtacatttagcgccatcgcaatgcctgccgcctttggtggcaacaagttttgaaaagtggagtgggtttgctgatgtttttcttgcgtgaaacgggagccttcaacgaaattgacaatggtggtgggatgcaggcgaaacttttcacaagaacgccgagtggtttcaacatctttaccacgtcgctccggatgacgtaataaataagcgcgggaataacgcttcataaacggcatatccaggctccagcacgccaggccaagaaatggcacccaggccagctgttgcttgaggaaatatttattcatcggaatgtgcttacgaaacagcacgcacagtacgacaatatctgcccaactacggtggttacaaataagcagataccagttcttcttacttaacccttccagcccgtgaacttcccattgaaggtgtgggttcagatgcagtaataccgccagaccttcacaccagcaatacatcataaaatcacaaaaacggctaacctttcgccaaatgactggcacaggtagcaatagttttacaatcccggcaatgatgatcgggacggaacaaaaaatagtgaccaaaatggtcaatacgatactcagcaaaagggttatcgcagcgagtattctcgtcataatgaatttattcaaaaggttagccatagacagtgcgctaaagaagcgcaaggcgcagattttagcagaaaacgacccaaataacggatgatccttaaggagaaaaataattcatatctatccacattagaaaaaatcccattatctcaattattagggatggatttatttttaactgcatgaaaaacaaagacaaacatcatgctgtaaaaagcatgataataaattaaaagcgatgtaaataatttatgcacaaagttatccacatgacgatttgcgagcgatccagaagatctacaaaagattttcacgaaaagcggtgaaaaactcatgttttcatcctgtctgtggcatcctttacccataatctgataaacaggcacggacattatggttcagatcccccaaaatccacttatccttgtagatggtagttcttatctttatcgcgcatatcacgcgtttcccccgctgactaacagcgcaggcgagccgaccggtgcgatgtatggtgtcctcaacatgctgcgcagtctgatcatgcaatataaaccgacgcatgcagcggtggtctttgacgccaagggaaaaacctttcgtgatgaactgtttgaacattacaaaagtcatcgcccgccaatgccggacgatctgcgtgcacaaatcgaacccttgcacgcgatggttaaagcgatgggactgccgctgctggcggtttctggcgtagaagcggacgacgttatcggtactctggcgcgcgaagccgaaaaagccgggcgtccggtgctgatcagcactggcgataaagatatggcgcagctggtgacgccaaatattacgcttatcaataccatgacgaataccatcctcggaccggaagaggtggtgaataagtacggcgtgccgccagaactgatcatcgatttcctggcgctgatgggtgactcctctgataacattcctggcgtaccgggcgtcggtgaaaaaaccgcgcaggcattgctgcaaggtcttggcggactggatacgctgtatgccgagccagaaaaaattgctgggttgagcttccgtggcgcgaaaacaatggcagcgaagctcgagcaaaacaaagaagttgcttatctcagttaccagctggcgacgattaaaaccgacgttgaactggagctgacctgtgaacaactggaagtgcagcaaccggcagcggaagagttgttggggctgttcaaaaagtatgagttcaaacgctggactgctgatgtcgaagcgggcaaatggttacaggccaaaggggcaaaaccagccgcgaagccacaggaaaccagtgttgcagacgaagcaccagaagtgacggcaacggtgatttcttatgacaactacgtcaccatccttgatgaagaaacactgaaagcgtggattgcgaagctggaaaaagcgccggtatttgcatttgataccgaaaccgacagccttgataacatctctgctaacctggtcgggctttcttttgctatcgagccaggcgtagcggcatatattccggttgctcatgattatcttgatgcgcccgatcaaatctctcgcgagcgtgcactcgagttgctaaaaccgctgctggaagatgaaaaggcgctgaaggtcgggcaaaacctgaaatacgatcgcggtattctggcgaactacggcattgaactgcgtgggattgcgtttgataccatgctggagtcctacattctcaatagcgttgccgggcgtcacgatatggacagcctcgcggaacgttggttgaagcacaaaaccatcacttttgaagagattgctggtaaaggcaaaaatcaactgacctttaaccagattgccctcgaagaagccggacgttacgccgccgaagatgcagatgtcaccttgcagttgcatctgaaaatgtggccggatctgcaaaaacacaaagggccgttgaacgtcttcgagaatatcgaaatgccgctggtgccggtgcttagtcgcattgaacgtaacggtgtgaagatcgatccgaaagtgctgcacaatcattctgaagagctcacccttcgtctggctgagctggaaaagaaagcgcatgaaattgcaggtgaggaatttaacctttcttccaccaagcagttacaaaccattctctttgaaaaacagggcattaaaccgctgaagaaaacgccgggtggcgcgccgagtacgagcgaagaggtactggaagaactggcgctggactatccgttgccaaaagtgattctggagtatcgtggtctggcgaagctgaaaagcacctacaccgacaagctgccgctgatgatcaacccgaaaaccgggcgtgtgcatacctcttatcaccaggcagtaactgcaacgggacgtttaagcagtaccgatcctaacctgcaaaacattccggtgcgtaacgaagaaggtcgtcgtatccgccaggcgtttattgcgccagaggattatgtgattgtcagtgcggactacagccagattgaactgcgcattatggcgcatcttagccgtgacaaaggcttgctgaccgcattcgcggaaggaaaagatatccaccgggcaacggcggcagaagtgtttggtttgccactggaaaccgtcaccagcgagcaacgccgtagcgcgaaagcgatcaactttggtctgatttatggcatgagtgctttcggtctggcgcggcaattgaacattccacgtaaagaagcgcagaagtacatggacctttacttcgaacgctaccctggcgtgctggagtatatggaacgcacccgtgctcaggcgaaagagcagggctacgttgaaacgctggacggacgccgtctgtatctgccggatatcaaatccagcaatggtgctcgtcgtgcagcggctgaacgtgcagccattaacgcgccaatgcagggaaccgccgccgacattatcaaacgggcgatgattgccgttgatgcgtggttacaggctgagcaaccgcgtgtacgtatgatcatgcaggtacacgatgaactggtatttgaagttcataaagatgatgttgatgccgtcgcgaagcagattcatcaactgatggaaaactgtacccgtctggatgtgccgttgctggtggaagtggggagtggcgaaaactgggatcaggcgcactaagattcgcctgaacatgccttttttcgtaagtaagcaacataagctgtcacgttttgtgatggctattagaaattcctatgcaacaactgaaaaaaaattacaaaaagtgctttctgaactgaacaaaaaagagtaaagttagtcgcgtagggtacagaggtaagatgttctatctttcagaccttttacttcacgtaatcggatttggctgaatattttagccgccccagtcagtaatgactggggcgttttttattgggcgaaagaaaagatccgtaatgcctgatgcgctatgtttatcaggccaacggtagaattgtaatctattgaatttacgggccggatacgccacatccggcacaagcattaaggcaagaaaattattcgccgtcctgcgtttcttctacaggctgcatctcgctaaaccaggtatccagtttctgccgcagcttgtccacgccttgtttcttcaagctagaaaacgtttcaacctgcacatcaccgttaaacgccagtacagcttcacgcaccatattcaattgcgctttacgtgcgccgcttgccagtttgtccgctttggtcagcagcaccagaacggcgatattgctgtctaccgcccactcaatcatctgctgatccaaatctttcagcggatggcgaatatccattagcaccaccagaccttgcaggctctgacgtttttcgaggtattcgccgagcgcacgctgccatttgcgcttcatctcttccgggacttccgcataaccgtacccaggcaagtcaaccagacgcttgccgtcagccacttcaaacaggttgataagctgggtgcgccctggggttttactggtacgagccaggcttttctggttagtcagcgtgttcagcgcgctggatttacctgcgttggaacggcctgcaaaagccacttcaattccggtatcggaaggtaggtggcgaatatcaggcgcactcatcacaaaatgcgtctgttgataattcaaattagtcaaagcggtcgtctccgtcagtcaaagctttgtggcgattatacctgaaccataataaaaggcggatttttcggcgtgagcgttgtaagtaaaagccatacgctttgtgagacattgccgatagtctttatgcgaaatagcagagaaaattctgcgatgcatgtcaaataagctatataaatcagtgaattgcttttatataaaactctgaaaatgtgcaaatactgatggcggttgattgtttgtttaaagcaaaggcgtaaagtagcacccatagagcgaggacgctaacaggaacaatgactcaggatgagggtcaggagcgccaggaggcgaagacagaggattgtcaggaagacaaacgtccggagacgtaattaaacggaaatggaatcaacacggattgttccggctaaaggaaaaacagggtgtgttggcggcctgcaaggattgtaagacccgttaagggttatgagtcaggaaaaaaggcgacagagtaatctgtcgccttttttctttgcttgctttctgttagattccgccgcaaatctatactgaataaaacggctaaaagacgaaccattatgaaaccaagttctagtaacagtcgcagcaaaggtcatgcaaaagcgcgtcgaaaaacacgcgaggagctggatcaggaagctcgtgatcgcaagcgtcagaaaaaacgtcgtggtcatgcgccgggcagccgcgcagcgggcggaaacaccacgagtggcagcaaaggccagaacgcaccaaaagatccacgtattggcagtaaaacccctattccattgggcgtgactgaaaaagtcaccaaacagcacaaaccgaagagtgagaaacctatgcttagtccgcaggcggagttggaattactggaaacggatgagcgtctggatgcgctgctggaacgtctggaagcaggcgaaaccctgagtgccgaagagcaatcctgggtggatgctaaactggatcgtattgatgagttgatgcagaaactcggcctctcttatgacgatgacgaagaagaggaagaagacgagaagcaagaagacatgatgcgtctgctgcggggcaactaacggattgccgccgtgggccttcccgttctgctgataacccttccggttatatgttatctggtgtggttattcgttaaactacagcggttgtcgcggcgacaaaagtggctgcgcaaccggctgatgacccgaaacgggcatccgccggtacgccgtagccgccagagacgccatcggaaggagtgagcatgtctgtacagcaaatcgactgggatctggccctgatccagaaatataactattccgggccacgatacaccagctacccgaccgcgctggagtttagtgaagacttcggcgaacaggcgtttttacaagccgtggcgcgctatcctgagcgtccattatctctctacgtacatatcccgttctgccataagctttgttacttctgcggttgcaataagattgttactcgccagcagcacaaggccgatcagtatctggacgcgctggagcaagaaatcgtccatcgtgcaccgctgttcgccgggcgtcacgtcagccaattgcactggggcggcggaacgccgacgtatctgaataaagcgcaaatcagccgcctgatgaagctgctgcgcgaaaacttccagttcaatgccgatgcggagattagcatcgaagtcgatccgcgggaaatcgaactggatgtactcgatcatttacgcgccgaaggctttaatcgcctgagcatgggcgtgcaggacttcaacaaagaagtgcaacgtctggttaaccgcgagcaggatgaagagttcatctttgcactgcttaaccatgcgcgtgagattggttttacctccaccaacatcgacctgatttacggcctgccgaaacagacgccggagagtttcgcctttaccctgaaacgtgtggcggagctgaaccccgatcgtctgagtgtctttaactacgcgcatctgccgaccatttttgctgctcagcgcaaaatcaaagatgctgacctgccgagtccgcagcaaaaactcgatatcctgcaggaaaccatcgccttcctgacgcaaagcggctatcagtttatcggtatggatcactttgcccgtccggatgacgagctggcggtggcccagcgtgaaggcgtgctgcatcgtaacttccagggctacaccactcagggcgataccgatctgctggggatgggcgtttccgccatcagcatgattggcgactgctacgcgcagaaccagaaagagttgaagcagtactatcagcaagtggatgaacaaggcaatgcgctgtggcgtggtattgcgctaacgcgtgatgactgtattcgccgcgatgtgattaagagcctcatctgcaacttccgtctggattacgcccctattgagaaacagtgggatttgcacttcgctgattactttgcggaagatctcaagctgctcgccccgttagcaaaagatgggctggtggatgtggatgagaagggaatacaggtgacggcgaaaggtcgcttgctgatccgcaacatttgcatgtgctttgatacctatctgcgccagaaagcgcggatgcagcagttctctcgggtgatttaaatagtgaatggcgcttcgtttacaaagtagaaaacgaaagcgccatcaatgtgctgagaacaagattgcctgatgcgctgggcaacaaaacctgttgaaattattgcttttgtaggccggataaggcgtttacgccgcatcaggcatctgagcatgatgcctgatgcggcgctggtcgcgtcttatcaggcctacgactttctccgcatccggcataaacaacgagcttcagctaaacagcccaatcattgcggcacacagcacggcagcaacggcagtttgcggtgtgtggctgtcaactgcgccactcgataccagattaattattgattccagcataatgactctccccgttttccgggcaagatcatactgaacttatcggaacagtaaagcgtaaaataccagcaatttgcgctcaataatcaatctttacacacaagctgtgaatcactccatccccagctcttttaacttacgcgtcagggtgttgcggccccagccgagtagccgcgccgcttcctgtttatgcccctgcgtatgtcgcaacgcggtcgtcagtaacgtccgctccagctctggctgcgcttcggaaagcagattttgatgaccggaacgcagcgctctgtctgcccactgcgcaagaagcgtcgcccagctgtccggttgcatttggctagtactctccgcaaccgtactttcaaacagttcgccgggcaaatcctgaatcaacacttcctgcccggcggccatcaccgttagccagcggcaggtgttttccagctggcgcacgttgcctggccacgccagacgcgtcagagcagcttcggtttccggatgcagtaacttcgcttctacgcccagttcgcgcgcggcaacctgtaaaaaatggcgcgccagacggggaatatcttcccgacgttcgcgcagcggcggcagatgaacgcggataacgttcaggcggtggaacagatcctcacggaacttaccttcctgcactcgctgttcgagattctggtgagtggcagcgataatccgcacatccactttcaccggcgcatagccgccaacgcggtaaaactgaccgtctgccagcacgcgcagcaaacgcgtctgcacatccagcggcatatcaccaatttcgtcgaggaataatgtaccgccatcggcctgttcaaaacgcccctgacgaatggtattcgcgccagtaaacgcgcctttctcgtggccaaacagttcactttcgatcaaatcttttgggatagctgccatattcagcgcgataaacggcgctttggcgcgcggactgtggcgatgcagggcatgagcgaccagttctttaccggtgccggattcgccgttaatcagcacgctaatagaagaacggctaagccgaccgataatacggaacacgtcctgcatggctggcgcttcgccgatgatatcggtcgttgggccgttaagctgaacattacgcggctgctgctgttcctggtaatgactgatagcgcgctcaaccagcgccactgcttcgtcgatatcaaacggtttgggcagataatcaaacgccccttgttgataggcgctgacggcagcatccagatcggaatgtgcggtcataatgatgaccggaagcattggatggcgctgtttaatctgcttgagcagcgccagcccgtccattcccggcatacggatatcactaagcagcacatccggcgttttgctcgccagcgcctccagcacttctgcgccgttctcaaacgtcgtacaggttaaacctgccccagcgagcgcacgttcaagcacccaacggatggaactatcgtcatcgactacccagactatccctcgttgcataaacgtcacctttatttcctgataggcaggtaaacgctgaactcggtatgccctggccaactggtaaattcaattttgccactatgctgatcaatcaaattacgagcgatggataagccaagcccggtgccaccttcgcggccgctgaccatcgggtaaaacagcgtatcctgcaaatgaggcggaatgcccggcccgttatcttccacatcaatccgcgccgccagccggtagcgctcgccgtgtaaggtcagttgaaacgcggtgcgggtacgcagaatgatttcaccgccttccggccccagcgcctgtagcgcattgcgcacaatattcagcaagacctgttcaatttgatccgggtcgtgcgccagttccggtaggctgggatcgtaatcacgaatcaaccgcacgttgtccggcagttccatgctcaccagcgttaccacgcgttcagccactttgtgaatactttcggtaacgcgcgtaccgggcagctgcggccccaacagacggtcgaccagatttcgcagccggtccgcctgttcgataatcactttggtatattcgagtagacttgggtcaggtaacgctttgctgagcagctgcgccgcgccacgtaaaccgccaagcggatttttaatctcatgtgccaggccgcgcactaaatcacgggcagcaacctgctgggcgtgctgtagctgttcctgacttaagcggcgctggttatccatcggagccatctccagcaggatcatgccgtccggcatacgctgggccgtcacagaaaggatatggctgcgcccgtcgatgaccagcgtcacttcgttatcggtaaaaccttgccccgcctccagactttcttgcatcagctcgatatttaaactgaagtagctcaacagttccggtaacggtgtaccaaacaatttgcgggagctttgggcgagcagttgttgcgcggcagggttggcgtaatggatcgccaggttgtcatcgattaacaaaatactgttaatcaggctgttgaggatctgcccagcatcgggctgcgtgcctgttgccataaagcagtctcctgaacaggttgcaccattttagtgcattatagctttttacggataaaaagcgcgaagcatcagagaattgacggagaaaaaagcccatgcagagatgggctacagatagctgacaaacttcacgttggagagcgactcacctgctccggcctaccacatcatcaccgtgtaggccggataagacgcatttgcgtcgcatccggcgtgatgtgcttgccaccgatcccaggcctgccagagacaggcgaaaagtttccacggcaactaaaacacttagacgctgtagtacagctcaaactctaccggatgcggagtcatacgcacgcggtcatcttcttcgcgacgcagagcgatgtacgcatcaattgcttcgtcagtgaacacgccaccggctttcaggaactcgcggtccagatccagttcgttcagtgcttcttccagagagcctgcaacctgtgggatctctttcgcttcttctggcggcaggtcatacaggtttttgtccatggcttcgcccggatggatcttgttcttgataccatcaagaccggccatcagcagggcagcaaagcacaggtacgggttagctgccggatccgggaaacgtacttcgatacgacgtgctttcggagaagaaaccaccggaatacggatagacgcagaacggttacgcgcagagtaagccagcattaccggtgcttcatagcccgggaccagacgcttataagagttggtggtcgggtttgccagggcgttaatcgctttagcgtgtttgattacgccgccaatgtagtacagcgcctgctcagacagacctgcgtatttgtcgcctgcgaacaggttaacgccgtttttagacagagacatgtggcagtgcataccggagccgttatcaccgaacatcggttttggcataaaggtcgcggttttaccgaagcggtgcgctacgttgtgcacaacatatttgtagatctgaatttcgtcagcttttttggtcatggtattgaagcgggtagccacttcgttctgaccagcagtcgctacttcgtggtgatgggcttcaaccaccagacccatctgttccatcaccagacacatttcagaacgaatatcctgagcgctgtctaccggtggaaccgggaagtaaccgcctttcactgccggacggtgacctttgttaccaccttcgtattgggtggaggagttccatgcgccttcgatatcgtcgatagcaacgtgggaaccggagatagaacttccgaaacggatgtcatcgaacaggaagaattcaggttctggcccgaacagtacggtgtcggcaatgccagtggaacgcaggtaatcttcggcgcgcttcgcaatggagcgcgggtcacggtcatagccttgcagggtgccaggttcaaggatgtcgcaacggataatcagggtggagtcggcgaagaacgggtcaatcactgcggtggatgcgtctggcatcagcaccatgtcggactcgttaatgcctttccagccgccaatgctggagccgtcaaacattttgccttcttcgaagaattcagcattcacctgatgagcagggatagtgacgtgctgttctttacctttagtatcggtgaagcgcaaatcaacaaacttcacttcgtgctcgttcagcatcgtcagtacgtgttcagcggacatactttaactctcctggattggtcatggtcgtcgtggtaacgaaatctgcaattattttggccgtgtcgccgtaaaaaagataaagcgaaatctgtgccaacttttaaattgcccctaaaaggcgttatcatgcgcaccatcgtgcaaaagggctgcaccacgatgtgaatgttgcaccaatatagtgcttcaatggaaacattaagcaccatgttggtgcaatgacctttggataaccctttttatgctccgtgaaagcgatcacaaagggactctgcaatacttgtttgcggaggatgtttgtgatcctgttttgtagtgcgattaatccgtgtacaataacgcgctatttctaatgcctgaggcaaagttgtgatcgaaaaattgcgtaatatcgccatcatcgcgcacgtagaccatggtaaaaccaccctggtagacaagctgctccaacaatccggtacgttcgactctcgtgccgaaacccaagagcgcgtgatggactccaacgatttggagaaagagcgtgggattaccatcctcgcgaaaaacaccgctatcaaatggaatgattaccgtatcaacatcgttgataccccggggcacgccgacttcggtggtgaagttgaacgtgtaatgtccatggtagacagtgtgctgctggtggttgacgcatttgacggcccgatgccgcaaacgcgcttcgtaaccaaaaaagcgtttgcttacggcctgaagccgattgttgttatcaacaaagttgaccgccctggcgcgcgtcctgattgggttgtggatcaggtattcgatctgttcgttaacctcgacgcgaccgacgagcagctggacttcccgatcgtttacgcttctgcgctgaacggtatcgcgggtctggaccacgaagatatggcggaagacatgaccccgctgtaccaggcgattgttgaccacgttcctgcgccggacgttgaccttgacggtccgttccagatgcagatttctcagctcgattacaacagctatgttggcgttatcggcattggccgcatcaagcgcggtaaagtgaagccgaaccagcaggtcactatcatcgatagcgaaggcaaaacccgcaacgcgaaagtcggtaaagtgctgggccacctcggtctggaacgtatcgaaaccgatctggcggaagctggcgatatcgttgcgatcacgggccttggcgaactgaacatttctgacaccgtttgcgacacgcaaaacgttgaagcgctgccggcactctccgttgatgagccgaccgtttctatgttcttctgcgttaacaccagcccgttctgcggtaaagaaggtaagttcgtaacgtctcgtcagatcctggatcgtctgaacaaagaactggtacacaacgttgcgctgcgcgtagaagaaaccgaagacgccgatgcgttccgcgtttctggtcgtggcgaactgcacctgtctgttctgatcgaaaacatgcgtcgtgaaggtttcgaactggcggtatcccgtccgaaagttatcttccgtgaaatcgacggtcgtaaacaagagccgtatgaaaacgtgactctggacgttgaagaacagcatcagggttctgtaatgcaggcgctgggcgaacgtaaaggcgacctgaaaaacatgaatccagacggtaaaggccgcgtacgtctcgactacgtgatcccaagccgtggtctgattggcttccgttctgagttcatgaccatgacttccggtactggtctgctgtactccaccttcagccactacgacgacgtacgtccgggtgaagtgggtcagcgtcagaacggcgtactgatctctaacggtcagggtaaagcggtcgcgttcgcgctgttcggtctgcaggatcgcggtaagctgttcctcggtcacggtgcagaagtttacgaaggtcagattatcggtattcatagccgctctaacgacctgactgtaaactgcctgaccggtaagaaactgaccaacatgcgtgcttccggtactgacgaagccgttgttctggttccgcctatccgcatgactctggaacaagctctggagttcatcgatgatgacgaactggtagaagtgactccgacctctatccgtattcgtaaacgtcacctgacggaaaacgatcgtcgccgcgccaaccgcgcaccgaaagacgattaatttcgttttttagtcataaaaaacctgccagcgatggcaggttttttttgcctgtcgtgagcgcacaccaatgcgagtatctcccttataagtctgtggttacgtcaatagagagctttgtcacaattatctgcaaagtcatacgccgttaattgctttcttttttggcgtaagcgtaagatgcttcatctggtttaaaccaaaaggattaaacaatggcggagaatcaatccaccgtagaaaatgcaaaagagaaactggatcggtggttgaaagatggcatcaccacgccgggtggaaaactccctagtgaaagagagctgggagaactgctgggcattaaacgtatgacgctgcgccaggcgttgttgaacctcgaggcagaatccaaaatcttccgtaaggatcgtaaggggtggttcgtgacccagccgcgatttaattacagtccggagctgagcgcgagctttcagcgggccgcaattgagcaagggcgagagccttcctgggggtttaccgagaaaaaccgtaccagcgatattcccgagacgctcgcgccactgattgcagtgacgccaagtactgaactctatcgcatcaccggctggggggcgctggaaggacataaagttttctatcacgaaacatatattaatcctgaagttgctccgggctttattgaacaacttgaaaaccacagtttttctgcagtctgggaaaagtgctaccaaaaagagacggtagtaaaaaaattgattttcaaacccgtcagaatgccgggcgatatcagcaagtatcttggcggttctgcgggtatgccagcgatcttaattgaaaagcatcgcgccgaccagcaaggcaatattgtccaaatagatattgaatattggcgatttgaggccgtagacctcatcattaatctgtaagtgttttatggtgacaataaataacgcaagaaagattctacaacgtgtcgacactcttcctctttatttacatgcttatgcctttcatttaaatatgcggctggaaagagtgttgcctgctgatttacttgatatcgcaagtgaaaataatctacgtggcgtcaaaatccatgttctcgatggcgagcgtttttctcttggtaatatggacgataaagaactctctgcctttggggataaagcccgccgtctgaaccttgatattcatattgaaaccagcgccagtgataaggcatctattgacgaagccgtcgccatcgcgttgaaaactggggcaagctccgtacgtttttatccacgttatgaaggtaatttgcgcgacgtattaagcattatcgctaacgacattgcctatgtacgggaaacgtatcaggacagcggcctgacttttacgatcgagcagcatgaagatttaaaaagtcatgagctggtgagcctggtcaaagaaagtgagatggaatctctttccttactgtttgattttgcgaacatgatcaatgcaaatgagcatcccatcgacgctttaaaaacgatggcaccgcatattacccaggtccatatcaaagatgccttgatcgttaaagaaccgggtggcctgggtcataaagcctgtattagtggtcagggtgatatgccgttcaaagcgttattaacgcaccttatctgcctgggtgatgatgagccgcaggtgacggcatatggcctggaagaagaggttgattactatgcgccggcgttccgctttgaagacgaagatgataatccgtggatcccttatcgccagatgagtgaaacaccattgccagaaaatcatttactggatgcgcggttacgtaaagaaaaagaagatgcaattaatcagataaatcatgtgcgtaacgtactacaacaaatcaaacaagaggcaaaccatcttctgaaccactaataagttttaactcatacgcagttaataaaaccattccatatgaatggtcggtatcttattgcctttaaaacagtgattttaaaaatcgcttaggggatgttatgctcacgaaaaagaaatgggcgttatttagtctattaacactgtgtggcggtacaatttataaattaccgagcctgaaagatgcgttttatatcccgatgcaggaatatttccatttgaccaatggtcaaattggtaatgctatgagcgtaaacagttttgtcaccacagtgggcttttttctgtctatttattttgccgataaactaccgcgcagatacaccatgagtttcagtctcattgcgacaggattactgggtgtttatttgacgacaatgccggggtattggggcatcctctttgtctgggcgctatttggcgttacttgcgacatgatgaactggccggtcttgctcaagagcgtaagtcgattgggcaatagcgaacaacaaggtcggttgtttggcttcttcgaaacagggcgtggcattgtcgataccgtggtggcattttctgcgttggcagtatttacctggtttggcagtggcttattaggttttaaagcaggcatctggttctattcccttattgtgattgccgtaggcattattattttctttgtcctgaatgacaaagaagaggcaccgtccgttgaggtgaaaaaagaagacggagcaagcaaaaacaccagtatgaccagcgtgctgaaagacaaaactatctggcttatcgcttttaacgtcttcttcgtttacgcggtttactgtggcctgacattcttcattccattcctgaaaaacatctatctattgcccgttgcgctggtgggggcttacggcatcattaaccaatactgtctgaaaatgattggtggaccgattggtggcatgattagtgataagatcctgaaaagcccaagtaaatatctatgctacacctttatcattagtaccgctgcgctcgtactgttgattatgctgccgcacgaaagtatgccggtctatttagggatggcatgtacgctgggctttggcgcgatagtctttacacagcgagccgtattttttgcacctatcggcgaagcaaaaattgctgaaaataaaacaggtgcggcgatggcgttgggtagctttattggttacgctccggcgatgttctgcttcagtctgtatggctacattctggatttaaatccggggattattggctacaaaatcgtgtttggcattatggcctgcttcgcattcagtggtgcggtggtttccgtaatgctggttaagcgtattagccaacgtaagaaagagatgctggcggctgaagcttaattaatggccggatgtgcttaatccggccaacgaaaaccgtatcaaccgtaggccggataaggcgtttacgccgcatccggcagtttcacatcagaagaaatacttcgtcccgatacggatctggttttgctcgcggtggtacggttcgacgttgcggtctaaccagcgcaattcgaaataagggagccagtgttcattaatacggtaacggaaggtgttagtgatttcccaatgatgatctttcccgttgctactattaaagtcattcactcgcatgaagtaatgtggctcaaatgtataggaaaatttatcggtgattttaaaattccagtaggtgccaatttcataggtgtcattattatccagttccccgctcaaatctgtactactatagttattatggttatagcgatttcgtactgtcagattaaaccatggtacaaatttatagttgacgtccagatacactgcaccaccgctaccgatactcttatcattaattaagccaccgggctggatggttaatttatcggttggtttaaataacggataccagccttcaatttcgttatatccatgttttagttcatcttctcgctgaaagttgtaggtattggttaacataatacccgcgcccatatcgaagttataacccacacgtagcataacctcgccctgatcggaggcaagattatatgcctccctgttttcgacgtatgcgccagcaaatacgctggcagaggtcagagaagataataaaattattgcattaatctttttcataataagtccattttttaaacgtagggaggccgccacccaccaggatggaaatagcggctattgacatttataacgttacggaagccgttttttcttctgtcgccatctctttatttttgcgttggttgatttcctcaataatcaatgcaaaccgtttttcattgagtgtgtaaaagaatcccatcgtcaatgcagcaataattgccagtgcacaaggccagataaaaatgagctgacgcaaaccctgtaatgtcgcatcgctttgcgcgatgttgggaacataaccaatttgcgtcagcataatgcctggcaagaagccagcaagtgcggcagaaattttacgaaagaaggtataaccggtataaacagaaccttcggcacgaataccggttttccattcaccgtaatctacggtatctggtaccagtgcccagttcaggctgtttacaaaggccgtgccaaaaaaggcgacacaagagaacatgacgaaagtgaaagagttacttccccagaaataattcagtatatcacccaccgcccacagcaccatgccagccagataaacctgttttttaccaaaacattttacagttaatggcaccagtaatacgccgatgaggatgcatcccatactgaagaatcccatccagctcaataaattaatatcattcagcacatactgggtgtaatagacctgaatcgccagtttgatattaaatgccgccagggtacacaagttagcaatgcataaaaccagcaatggcggattccgaaatatcgcgcaaaaacttttgagaatactggctttatgtccggttggcgttgtgtccacataatgctctttgacgcctctgtagcacagcatcataaaaataaagccgccaatggagaacataagtgccgcacaggcataaccgacggtactgtcagaaaaaaggctctgcaacggaataaacgccacggtacaaatcaatagccctatggttgcaccaccctggcggtaagccgcgagctgcgcgcgctcattcgggtttttggtaattgccgggatcatcgcaccatagctgcagttcatcagactgtaactaagtccaaacatcataaacagcgcggtggcaatcgtcgttttaaccggcaaacaaaaggtggtggcgataaactggagcgttgcaattaacgccgccggaaccgctgcatataaaataaagggacgaaatttgcctttaggcccaatatttttccggctgtcgagtaaaaatccggtgagcatatcggtaaacgcggtaaaaaacttcgccaccagaaagataatcccgccatagtaagcaggcatccctaattcatcggtataaaatttgaggagatacagagtaccgatgcagagcattaaattgctaccgacgtcgcccataccataggcgattttttcccgcagattcagttttaatgtcagtggattatggtcagacataatcactccttataacgccccgcagggcgtcgtttattattattacgccgtgcgtttacgggcttctatctcttccacaatgcggacatacatcttctcgttcaggctgtagaagcaacccatcgccacaatggtgactaccgccagtgcgcttgggtagatgaagatcaactggcgtaacccttcaatggtgtggtcagcctgtgcgacgttcggcacatagccaatttgcgtcagcatccagccggggaagaaaccagccagcgcctgagacactttgcgaaagaaggtaaaaccggtgtagaccgttccttcgctacgcacgccggtgcgccactcgccgtactcgacggtgtcggaaaccagcgcccagttcaggctgttaacaaacgcactgccaaagaacgccaggcaggagaacgccacgaagctgacgctaccgccgccgaagaaatagttgagcagatcgcccagcacccaaatcagcaggccgccgatataaactttcttcttgccaaaacgtctgacactggcaggcatcaggaatacgccgatgaaaatacagcccatgctgaaaaatcccatatagctcaacaggatgggatcgttaagcacgtactgggtgtaatagacctggatggcgagcttgacgttaaacgcccctaaagtgcagaggttggcaatgcacagaatgaacagcgggcggttacccgcaattgcgcggaaagattgcagcaggcccggcttttgcgccggattagcaggctgggtttcgacataacgctctttcacgccgctgtagcagatccacataaacagcaggccaaacagactaaacagcgtggcggcgaagatatagccaagttgctgattaccttcgataagattcataactggcacgaatcccaccgtgcacagcagcaggcccagcgtagcgccgccctgacgccatgccgccagactggcgcgttcgttggggtttttggtgatagcgggaaccattgcgccgtaggagcagttcatcatgctgaaaaacagtccgtaaagcataaacagaatagtggccatcaccgttttaccggtgacatcaaacggtgtgccgacaaagttggcgatcgccagtaaggtgaccgggaaactcgcatacagaataaaaggacggaacttaccttttggaccgatcttgcgtcgggaatccaacataatgccggtacccatatcggtaaacgcagtaaagaatttactaatcaaaaagataatgccgccataggtgcctggcagccccagaacgtcggtataaaacttcaaaagataaagcgtaccgatatccagcaggatgttagaggccaggtcgccaataccgtaagagagtttctctttaaagggcaggcgtaaagttgctggatcttccgttgtgatgtgactcatgcttgttctccctttgcccatgagtttccccacgggcggatgtgattagatgctttttaagctcgcgaacagtgccgcccattcgctatcggcgcgataaaagaccggcggcttgccgatgggcgcattaacggtaacttccccgccccggaacgcttcacccgtccaggcgtggacccagttatcctccggcagatagagcgtccagtcgctacggccttcttcatgcaccggagcgaccagaatgtcgcgacctaacaggtactgatatttcagggtgtaagtgtgcgcatcgtcttcgtaatgcaggaacagcgggcgcataaccggcaggccggacttcgcattcagcgcgacggcctctttcaggtaaggtttcagggtggtgaagacggtggtcatacgggcgaaatgggcgatggtttctgcgtcgccgtcaaactgccagttgtcgccaggacggttaccttcgtgggtgcgcatcatcggcgtgaaggcgctgaaatcgcaccagcgcagcagcagctctttgctgcgcttcatctcaaacagggtggtgtaaccgccaatgtcgctgtggtgcaggccatgtccggtcattgccaggctcagcgccgccgggacaacgctcgccaggccatcgtcgagactccagtcgacgttctggtcgcccgcccacatcatggtggagtatttctggctaccggtagaaccggcgcgcataaagaaaaggatctcgccgagcttgcccgtttcttcaagggcttcgtagttacacttcgcccacagcgcaggccaggcgttatgcataatttcggcactgacgccgttatgcaagtacgtgtcggtgggcagatactcgccgaagtcagccatccagccgccgcagccgagttcaatcatgttctttttgatcacttccttgaaccaggcgtaggcttctggattagtgagatcgacaacgccgccgtaaaactcgccaaactccaccagatagtcaccgccagaggcatcttttgccagatagccgtgttgtgccgcttcttcgcagagatctttatcgctggcaacatacgggttgatataggccaggaactgcacgccctcctgattccactgcttaatgcgactatccagttgcgggtagttttcgctgttccacttccagttccacatcacgcgtttgccaaaagaggtcatacgaataccggaccagtcctgcgcccagatgccgttgaccttcacgcccgcgttacgcatggtgtccagtttcttctggcacacttccgtcccgccctgaatgccgagcgttactccgtcataaatccagtcgggcagttctggctggcgtcccagcagggcggttaatttttccagcagggaaatgtatgtgtcagcacattcaaaacgcagcgttgctttgtcttcccacagcgccagttcatggtattccggggcactaaagtcgaagttcatatagcaactgttatcaacatggcagtaatacttctgcgtgctgacaaacgtaggctgtgggaagaaagtccagtaatagtcgccgcccgcattttctttgcagtcggcctgccaggtgacataggtttgtttgttgcgaccaacgccttgttcactggtccatagcgggaacggtttgccacgcagatcgaagtaggaaaactgttcgccgcagccgtagatatggtcctctggttgagcggcaaggcgcagccagatacggttgtggttaaggttgtcgttttgtagttccagcaataaacgcccctgatcgtcggcagagatattcagcgtggcgctaatgtcagaaccacggctgaaatgaattaaccaaccatccggactctggctgacgatggcgtcggtaagcgcaattttctcctgtagtttatctttaatgctgaaattaccgcggaacatatcgatatccgctataccactgccaatccataaacaaggattatctttgctatgggttaaaataagacgttgttgaaaatgtagggtaaaactgtcgttattctgatgaaattgaaaatctaataactgtggacgtggcgtatccataactaatctccatagagttgagaacgagattgttgccttcctgttattacaggcttatgtaaaatgattctcataaaactgatatataaaaactttacagaagctgagctgtttttaacttaataaattgaagatacataatgttgcctttagcgagtgaaatgttcttcaatgattttgactgctaatcaatacaagttattttctctgtccgtaaatattaaaaaacaggcggtgcggttttccactttccagtaataataagtcgataccactattaaaggcgttaggcgggcaactcataggttcaactgccagtccctgacgctgtaatttttcaccgctataaacctgcacccagagttgatcggaacaaaggcttacgctaagcgcctgctgtggatgggtaatggtcatttcccacaaatcattagcggttttaaaggtgtggtcgatttttgtcgcggctatttttttcgcctgcgtgaaatttaaatccagctcatcaacgtggtgaagcgttgtcggattcgcgtgctcatcgacggcataaacctggtttgccggaagctggaacagatattcatcaacagatgttaagttgcaggttaaataaggatgaatacccacgccataaggcgctgcgacagtgccgatattctggcttgcgatctcaacggaaagacccgtgtgtgcgttgaggctataaacaacttgactagccagcataaacggatagccgtaactgggcggcagaaaagctgtcagggtaacgctggtggcggttaattcactaatttgccagtctcgccaggcaagcagcccgtgaatagcggctttactactatgttcattaatgggtaactgatattcctgcccctgatagcggtaacagccgttggcgatccggttcggccacggaataagcactttacccagatgcgccagcggcatctcttcgggtttgtgcgggatgactaaatgacaaccctgaaaggttaattcagccagaccagcaccgacggtcacaatggtcgcgtgataatcccccgcggcaagactaacggtctgtccactgcaatgcatattggtgatttgcatacaaggcaccttaattaagctcatacagcctcccgtgaggctgatgtcaaacccaaaaactgcaccggacggtcccctcgcccctttggggagagggttagggagaggggaaaacccgcaccctattttcagatcagttatttcgcattaatatccagcagacccgctgcaaccgctggagccatgccgggcgctaacgggatacgcgggatcaccaggcaatgcagcaggtgataaatatcctgtttgccgtcccagactttggtggtgaccttattgtccgcatccagctcctgccaccaggaaccattttcatagtccatcaggtacttaatgcagtactcccaccatgtttgataccaggtttcatactggcgatcgccagtgacggtgtagagcgcgtaggccgtacccattgcttcgacgataggccaacgtacacgttcgcggaccaccggttttccttcccagtcaacggtataaacaatcccgtccgcgccatcgggtgcccaggcatcgcgcacggtggcgttaaacagacctttggcatcttctagcagccatgctggtggttgttcgcaacgggcttccagggcagcatggatgtgcagcattaaacggccccattcgatccagtggcctggtgtacctccgaacgcgcggaagcgatgcgccgggttatctttgttgtaatccggcagcggattccactgggtatcgaagtgttcgttaacgcgataatgattatttctggcgacgtcgtggataatcacggaagccacgcgaatcgcgcgatccagccattttttgtcgtgagtgacgtcataaacaatcaagaaagcttccaccgcgtgcatattggcattgccgccgcggtactcttcggttttgctgaaggcttcgtcccaggattccaggcacatctgctcttcttcgctccagaaatatttctcgataatttcaatggtgtaatcgagcagcttgcgcgcttccgggtgacccgttgtgacggcgctggcggcacccagcagagcaaagaagtgttgatagccctgtttggaggcatccaccacgccctcgtcattcacgcaggcataccagccgccatattttttatcacgcagtgcgccgttcatggctttgataccgtgatcaaccaagctgtaagcgccaggtcgacccatcgccgcagcaacggaataaacgtgcaacatacgagcggtgatccacagatgggtgcccatctcttctttgatttgccctttattgcctaaccagccaaaaccagtcggcactacggaatttttaccaaaatcaaagatgcggtcggtttcctgttccagccaacggttgtggcttagggtgttaaaccatttcattccttttatcctcatcttagcggcgtttagccatcatttcgtcgacgatatcgccaagttgttgtaatttcggtgcgcaaacgtcacgcagcatcagctcgttgtctggtaaaccgacgacgcttgcccagactgcacggcctgccaggaatccgcttgcgcccgccgtcattgccacgcgtacggcacgcgggaacagtttttcgtcgacaccggaagagaggatcacccatggcatattgatatggtcattcagacgttgactagcacagagaagctcttgttgcggacctttgccataaagcggcatttcaactttgtagaggtcagcgccactgtcgcccagctctttggcggcatcgatgatcgcttgttcgcgatcgaatttatcgccacgacgcggtgggcggacgactggctcaatgatgcttaccagaccgtgactgtggcacagttcgttgaactctttcaccatatccagacgttgctgcgcatcttcatcactacgccacagcaccagcagttttaaggctttgccaccgtcttgtttgatctgtagcggattgattttgcggtcaataaccacgctatcgaccggaataccgttgccaggaatgaactcatcggcggcgacaatcatggcgcaacttttggcaatcgcgttttgctcaaccacctggcggtagcagaattgttgatctaccagaatcgcgctggcataagggctgagggcctttgcagcgttaactttgaaatcagttaaaacgctatcggctaccggagcgggtgccccagccgcggcaaacatcatgcgcatggcttcgcgctgatcgaccgccagcatggcaaaaccgccgcttgcgcgcgtaatgtcgttgatggtgtacttattcattcatttattcctttatccagtcgttacatttttactttggcagtcatcccggcactgacacggacctgttccagaatggcggaccagtcctggcgaccgcgacccgctgcgcgcgcctggctataaacctcccgactggcggcccccagcggcattggcacatgcagctggttggcgacatcaagggcgatgccaagatccttatgggcaagatcgatcatgaaggcgggagaaagatctccgctgaggactttgtttggccaggaagtggtgaagtgacctttaccggcggcggtaccgctcatcactttgacggcaacatcgaagggaagattcagggcttcgcacaaaacggcggcttctgcgctaagcgcattgagcgcgatgctcatgtagttgttgatgagcttaacgcggatccccatgcccggaccgccagcgttgatcaactcactgcccatcgccatcaggatcggtgtggcacgttcaacttgttcagcggtgccgccagccagcagtaacagagtaccggtaatggcatttgcagaagtacggcctaccggaacatccatcatgctgaagcctttggcttgcatatcggcaatcaatttatcggtttgcagcggatggatggtggacatatcaatgaccagcgcatcggtagataagccttcgcaaacgccgttttcaccgaacaacacgttgcgcaccagatcgccattcggcaacatggtaatgataaattcggcatctttagcggcctgcgccgggttggcggcgggagtcgcacctttgtctaccagatgccgcacagcttcggcgttcacatcaaagacgcgaagttgatgcccttgctgcaataaattgctcgccattgggctacccatttgtcctaaaccgataaacgcgattgctgccataaccctctcctgaatacagttatgtcactttttgtcatttatgacatgctttgcttgtctgtttttgatcgtatttgtaatttatcgtcaaaaaattgacagccgtcactttttaaacaattggtgaaattaaaatgaacgcatcccaaaatgtttaaggaatgaccatgattcgtgttgcttgtgtaggtataaccgtgatggatcgcatctattacgtggaagggttaccgacggagagcggtaaatacgtggcgagaaattatacggaagttggtggcgggccagcggcgacggcagcggttgcggcggcaaggctgggggcgcaggtcgattttattggtcgcgtaggtgatgacgacacgggcaacagcctgctggcagagctggaatcctggggcgttaacacccgttacaccaaacggtataaccaggcgaaatctagccaatccgccatcatggtggataccaaaggcgagcggataatcattaactaccccagcccggatctgctgcctgacgcagagtggttggaggaaattgatttctctcagtgggatgttgtgctggcagatgtacgctggcacgacggcgctaaaaaagccttcaccctggcccgtcaggcgggtgtgatgaccgttctggacggggacattacgccgcaggatatcagtgagctggtggcattaagcgatcacgcggcctttagtgaaccgggtctggcgcgcttaacgggcgtgaaagagatggccagtgcgctaaaacaggcacaaacgctcacaaatggtcatgtctatgtgacccagggtagcgcaggctgcgactggctggaaaatggtgggcgtcagcatcaaccggccttcaaagttgatgtggtagataccacaggtgcgggtgatgtttttcacggcgctttggcggtggcgctggcaacaagtggggatttagcggagagtgtccgcttcgccagcggtgtagcggcgttaaaatgcacacgtcccggtggacgagccgggatccctgactgtgatcaaacccgatcttttttgagtctttttgtataaaatgccagggtgatggtttttcgaggaattttcatgagccttaccgaactaaccggtaacccgcggcacgaccaactcctcatgctgatcgccgagcgtgggtatatgaatattgatgagctggcaaatctgctggatgtctccacgcagacggtccgccgggatattcgtaaattaagcgagcaaggcctgattacgcgccatcacggtggcgcgggtcgggcttccagcgtcgttaatacggcgttcgagcagcgtgaggttagccaaaccgaggaaaaaaagcgattgccgaagcggtggcagactatattcctgatggtagtacaatatttatcaccattggtacgactgttgagcatgttgcccgggcgttacttaaccataatcatttgcggataatcaccaacagcctgcgtgtggcgcatattctttaccacaacccgcgctttgaagtgatggtgcccggcggtacgttgcgctctcataatagcgggatcattggccctagtgcggcgtcctttgtggctgattttcgtgctgattatctggtaacaagcgttggggcgattgagagcgatggcgcgttgatggagtttgatgtaaacgaagctaacgtggtgaaaacgatgatggcgcacgcgagaaatattctgctggtcgccgatcacactaagtatcatgctagcgcggcggttgaaattggtaacgtggcacaggtcactgcgctctttaccgacgagctgccgcccgctgcgctaaaaagtcgcttacaagacagccaaattgaaatcattcttccccaggaagacgcgtaaatttttgtgaccgttaacctggcttcataccttgccacatagccaaacccatcctttcccgctacagttaatttcttgtggcgcgaaaggaggcaaaaatgctctatatctttgatttaggtaatgtgattgtcgatatcgactttaaccgtgtgctgggagcctggagcgatttaacgcgtattccgctggcaagccttaagaagagttttcatatgggggaggcgtttcatcagcatgagcgtggggaaattagcgacgaagcgttcgcagaggcgctgtgtcatgagatggctctaccgctaagctacgagcagttctctcacggctggcaggcggtgtttgttgcgctgcgcccggaagtgatcgccatcatgcataaactgcgtgagcaggggcatcgcgtggtggtgctttccaataccaaccgcctgcataccaccttctggccggaagaatacccggaaattcgtgatgctgctgaccatatctatctgagccaagatctggggatgcgcaaacctgaagcacgaatttaccagcatgttttgcaggcggaaggttttagtcccagcgatacggtctttttcgacgataacgccgataatatagaaggagccaatcagctgggcattaccagtattctggtgaaagataaaaccaccatcccggactatttcgcgaaggtgttatgctaaaaaccattcaggacaaagccaggcaccgtacccgtccactatgggcctggctaaaactactctggcaacgcattgatgaggacaacatgacaaccctggcaggtaaccttgcctatgtgagcttgctcagtttagtgccgctggttgccgttgtttttgcgcttttcgccgcttttcccatgttttccgacgtcagcattcagttacgtcactttatttttgccaactttctgcctgctactggcgatgttattcagcggtatatcgaacaatttgttgccaattccaacaagatgaccgccgttggggcgtgcgggctgatcgtcaccgcgttattgttgatgtactccatcgatagcgcgttgaataccatctggcgcagtaaacgagcgcgaccaaaaatttacagcttcgccgtgtactggatgattttaacgctggggccgctgctggcaggggccagtctggcgatcagttcctatttgctctccctgcgctgggcgagcgatctcaatactgtcatcgacaacgtgctgcgtatttttccgttgctgttgagctggatctccttctggttgctgtacagcattgttcctaccatccgcgtacctaaccgcgacgcgattgtcggcgcgtttgtcgccgcactcctgttcgaagcaggaaagaaaggtttcgcgctttatatcaccatgttcccgagttatcagctcatttatggtgtgctggcggtgatccccattctctttgtttgggtctactggacatggtgtatcgtcttgcttggcgcggaaattactgtcactctcggggaataccgcaaactaaaacaagcagctgaacaagaagaagacgacgaaccatgattgcattaattcaacgcgtaacccgtgccagcgtcaccgtggagggagaagtgacgggcgaaattggcgcgggacttttggtgttattgggtgtcgaaaaggatgacgacgaacagaaagcaaaccgtctgtgcgagcgtgtgctcggctaccgcatctttagcgatgccgaaggcaagatgaatctcaacgtgcaacaggcgggcggcagtgtgctggtggtttcccagtttaccctcgccgcagataccgaacgggggatgcgcccaagtttctccaaaggtgcaagtccggatcgcgcagaggcgttatatgactatttcgtcgaacgctgccgtcagcaagagatgaacacgcaaacaggacgcttcgctgcggatatgcaggtaagcctggtcaatgatggccccgtgacattctggttgcaggtatgagccagcttccagggttgagtcgggaaacaagagagagtatcgctatgtatcaccttcgggttccacaaacagaagaagaattagagcgttactatcagtttcgctgggaaatgttgcgtaagcccctgcatcaaccaaaaggtagcgaacgcgacgcgtgggatgcgatggcgcatcaccagatggtcgtcgacgagcagggtaatctggtggcggtaggccgactgtatattaatgccgacaatgaagcgtccattcgctttatggccgttcatcccgacgtgcaggacaaagggttaggcacgctgatggcgatgaccctggagagcgtggcgcgtcaggaaggcgttaagcgcgtgacctgtagcgcccgtgaagacgcggtggagtttttcgccaagctggggtttgttaatcagggagaaatcaccacgccaaccaccacgccgattcgccattttttgatgattaagcccgtcgccactctggatgacattctgcatcgcggcgactggtgcgcgcagctgcaacaggcgtggtacgaacatatcccgcttagtgaaaaaatgggcgtgcgcattcagcaatataccgggcaaaaatttatcactaccatgccagaaaccggcaatcagaatccgcaccatacgctgtttgccgggagtttattcagtctggcgacgctcactggttggggacttatctggctgatgctgcgtgaacgccacctcggcggaacgattattcttgcggatgcgcatatccgctacagcaagccgattagcggtaaacctcatgcggtagccgacctcggtgccttaagcggcgatctcgaccgtctggcgcgcggacgaaaagcacgggtgcagatgcaggtcgaaatctttggcgacgagacgccgggtgcagtgtttgaaggcacgtatatcgttctgcccgcgaagccatttggcccgtatgaagagggcgggaacgaagaagagtaactgatggagaggggcggtgctgcctctctcattcaggtcatttatattagtccttggctatttcggttatattaaataagaactctataaatttttattcttcgttggctccatacgtgtcttgctacatcactgttcaggagcatttaaatattatttgtagaactgagtggcaattatcgcagataatgcttaattcatcatcttagttcatgtttgagcgatttttgatagtcaaaaccccctctggtgccatacttttctcataaatatttttaaaatctatagctaacaaatattatgcaaagataatggactagcatcattgtcagtatcattcatttactgctctgtatgttatgaataattatgttgtatgtttgctcttaaaccgtgggaaggaggctataatggttgccaatattaatctcattaaacaagaaagttattctgttgttaatttagaaaaacaactttcccgaactgttaccaacaaaattataacgatgagcaagtaaagaccggttggtggcagtactgaccggtctgtgatgaaagattaatttcaccttaaatcctggtgctgttaggatgctgacgtttttcggctacaccattcagattatgcaaataaatatctctgaatataatatattcatagcacccataattcatcctgggcgataactaaaccatttttgagtaataaatgaaacaactgcaacactcttattatttctggaaaacgcctcgcaaaaacaaaacaacatgcaaaaatccgctttttttaaatgattttccggcgtaattttcgcacatacattaatgagtaatatatgtaaggtattggtaatggcgatgaatacggtttttcttcatttaagtgaagaggcaattaaacggctgaacaagcttcggggctggcgtaaggttagtcgatctgcaattttacgcgaagcggtagagcaatatctggaacgtcagcaattcccggtgcgtaaagcaaagggaggcaggcaaaagggggaggtagttggtgttgatgatcagtgtaaggagcataaggaatgacaaaaatttttcattcttgaatataaaaaacagatgcccttattctggtattaatacaaggctgttttacttgaacttataataactgcaactgttacatcatatctggaaaacgcctcgcaaaaataaaaaatgatgcgtaaatgagctttctttaaagattcggcaagggtacttttctctccatagattcaaaaatgatattggcgagatatttatgaactctctggcaggtatagatatgggcagaattttactcgatttaagcaatgaggtgattaagcaacttgatgatctcgaggtgcagcgtaatcttcctcgtgcggacctattaagggaagcggtagatcaatacctgataaatcaaagccaaacagcaagaaccagtgttcctggcatctggcaagggtgtgaggaagatggtgtcgaatatcagcgtaagctgcgcgaggaatggtaatgggaaaaaatgatgtcaatcagattgctgacaacgtgcgcgttgttcatgccggatgcggcgtgaacgccttatccggcctacaaagtcgtataaattcaatgtattgcagtttattggtaggcctgataagcgcagcgcatcaggcaatcttacgcttgtcatcagtctcatgcccataaccttattgatgtggtggtgggtaaattgaggccaaaccggcactggcggcatagcttgaggtggtaacgcggaatacgagagatggtgtcgtcacaccctatgagctgtaatccgggcgacctgcgccacccggaaaacgtcagagattactctccttcacccggaaacaggaacgggttgatggaactgcgggcatagccttcttgctccattcgtgcgtccagtaccagagaggcgaggtcatctgctacggcttcgatttttggatctttttcctgatagagaattttcaggtaagtgtcgcagtcatcgcagctttcggctttaatcgcggcctgttcgtcatccaggctccagtaatgcagtttgccgctctgctcgcagttgctgcattttacgcgcactacgtgccattcagtttcacacaggttgcagtgcaggtaacgtagcccctgagtggtgccaatttgcaccatgctggacaccggcatagaaccacaaaccgggcaatattgacgttgctcgccgtattcagcgcgggctttgccggggatcagattggccatctgcgcccagtagaggctcagtgcagcccagataaacggcgctttatcgctgctgacggagctgaaatcagaggcaaacagcgcgctggccatatcttccagctcctgagtgcttgccttctccagattctcaatcactgccagcgccgggccgctcatttcaggtttcagctcagcaatcagcgccatcagcagcttttgccagtgcttatcacgcggcagaacgtgaatatccagcgggggcttgccttgtgcgctggcttctttaatgcgcgcagtcagatccatctccagcggatggtcgtacagcaccacttcctgggcgtgggcgataagcgcagcaaagcgcaggtaatcacccagaggattattttctgccagctcgcgcagacgctcggcgcggcggttgtataaattcttgagccgagggaacaataacggcggaatcatatccgccgtacgtttctcgctactacccagctcatcttgcgggattatgcgaatactcattcagctttcttttccgttgtcttgcggacctcacggtaccagcgcgggtgatgtttcttcgcccaggcgctggtaacccatccttccaccatggcggtaatcgtgcctttcacccaaagggcggcgtagatatgcaccatgataaccacaattaacgccactgcggcaaaactatgcagcattaacgcgaatcggatcaccgggatactgaaagcaggcgcaaaataaggacgccagataatcacgccgctcaccagcagcagaaccaggaaaataatcgccgcccagaaaacgcatttctgaccgaagttataacgcccggtgtcacctacttcctcgttgacgacgatcttacgaatattcttcgcccaaaagatatcatcccgattgattaggttgtgatgccagtaacggaaaaacatgatgatgaagctggcaaacataaccacgccgacaaacgggtgcagaattcgcgccagctgcggtgtgcccatgatttgcatcaaccagttgaaggacgggaacaaaaagcccagcccgctcaccgccgccaggatgaagcagaaggcggtgatccagtggttgatacgttccggcgcggtgtagcgcacgatggtgtcacgtcgtttcatttgcgctcctcgtctttctcttcgtgcagattattctcttcctcatccgcacggttcggaccgacacccacgtagtggaagatactggccgcaaaggtagccgcaaagccaacagccgcgagcggtttccagatgcctttccagaatttcacggtttcgctgatttccgggttctccggcaagccatgatacagatttggcttgtcagcatggtgcagcacgtacatgacgtgtgtaccaccgacgcctgccggatcgtacagacccgcattgtcgtaaccgcgggttttcagctcagcaacgcgctcgctcgccagcgttttcatgctctctttcgtaccgaagtgaatcgcgcccgttgggcaggtcttcacgcaggctggttcttgcccaaccaccacgcggtcaacgcacagcgtacatttgtagacgcggttgtcttccgggttgaggcgcggaatgtcgaacggacagcccgcaatgcaataaccgcagccaatgcactgctcggactggaagtcgacgataccgttggcatactgaataattgcaccttccgccgggcacgctttcaggcagcctggatcggaacagtgcatacagccgtctttgcggatcagccattccagtttgtcgttctgctccacttcgctgaagcgcattaccgtccagcttttggcgcttaaatcattggggttgtcgtacaccccaatgttattgccgacggtatcgcgaatgtcgttccactcactacacgccacctgacaggctttacagccgatacaggtggtaacgtcgatgagtttcgccacttcttcctggaagtcccgcgcctgaggcgcgggggtcagaccgttagtcgcggaacgacgaatgatatcttgagattgataagccatatgtcgtctccgttacaccttttccacattcacaaggaaggacttaaactccggcgtctgcgtgttcgcatcaccaacgaatggcgttaaagtattggcaataaagccttttttagctacgccttcatagccccagtgaatcggaataccgatggtatcgatatctttgccgttcgctttcagcgtgcgaatacgtttggtcaccaccgctttggctttgatatagccacggttggaggagactttcacggtatcgccctgggcaatgccaagtttattcgccaggctctccccgatttccacaaactgctctggctgcaaaatcgcgttcaacagcgcgtgtttggtccagtagtggaagtgctcggtcagacgataggtggttccgacatacgggaacttatcggctttacccaatgcttcggcgtcgtctttaaagatacgtgcagccgggttgctgataacgtttggatgcagcgggttagttcccagcggcgtttcaaacggctcgtagtgttccgggaacggaccttccgccatcttatcgagggcaaacagacgccccatgccttcctgctgcatgataaacggcccgacgccgctacccggaggcgctgcgctgtagtccggaatatcccagccggtccacttagtgccgtcccatttcagcaactgacgcttcggatcccacgggttaccctgcggatctgcggaggcgcggttatacagaatgcggcggttaagcggccatgcccatgcccagcccagcgtgttaccgaggccagacggatcggcgttatcacggcgtgccatctggttgccttccggcgtccagctaccggcgaaaatccagcagccacaggaggttgtaccgtcatcgcgcaattgggcgaagctactaagttgttggcctttcttgacgataaccgcaccggttgccggatcggtaatatcggccagcgccttaccgttgctctccatcgccacttcttcactagatggctcatgcggaatggcgtagttccatgtcatgttcagcacctggtccgggttcgcgccaccctgttcggcatacatcttgcgcaagcgcaggaagataccggagaggatctcgccgtcagtcagcgcaatccccggggcgtccgcacctttccagtgccactgtaaccagcgaccactgttaacgatagaaccgttctcttccgcgaagcaggtgcttggcagacggaacacttcggtctggatcttgctgctgtcaacttcgttcagctcaccgtggttctgccagaagttagaggtttcagtgttcagtgggtcgatggtgacgaggaacttcagtttgctcagacaaccgatcactttgtttttgttcgggaaactggcaacagggttaaagccctggcagatatagccattgaccttgccctctttcatcatctcgaagtattgcaggacgtcgtagcctttatcccacttcggcaaccagtcaaagccccagctattttccgccgtcgctttatcaccaaagaaggccttcatcatagagacgaagaatttcgggtagttgccccagtagtttacctggccttccagcagcggttttggcgtgttggcggtaaggtaggtttgcagatcggtctgcttctcgcttggcagcgtcatgtaacctggcaggctctggctcagcagccccaggtccgtcagcccctgaatattggagtgaccgcgcagggcgttaacgccgccgcctgccatccccatattgccgagcagcagctggatcatcgccatcgtacgaatgttttgcgcaccaacggagtgttgcgtccagccgagggcatacaggaagctggcagttttatcgtgagcactggtttctgcgatgtattcgcagactttcaggaacgcgtcttttggcgtaccacagatgttttcaaccacatctggcgtgtagcgggaaacgtgctgtttcagcaagttccacacgcagcgcggatgttgcagcgtggtatcgcgtttggcgaagccgttttcgtccagttcataagtccaggaggatttatcgtacttgcgtttttccgcgtcgtagccggtgaacaggccatcttcaaagccgtaatcctcacgcacgatcaggctggcgttggtataggcttcggtgtattcgcggttgaatttttcattgttcagcaggtacagcaatacgccactcaggaaagcaatgtcagtaccggaacgaataggggcatagtagtcagctaccgccgccgtacgcgtaaagcgaggatcgatcacaatcagcttcgcgccgttgtgaattttggcttccatcgcccagcggaacccgaccgggtgagcttcagcggcgttaccgcccatcaccacgacgaggttggcgttcttgatgtcgacccagtggttggtcatcgcaccgcgaccaaatgttggagcaagacttgctaccgttggtccgtgtcagacacgcgcctggttgtcgaccgcgagcatacccagcgcgcgggagaatttttgcgttaaatagccggtttcgttactgctcgcggaagcacacagcatcccggtggagagccagcggttaacagtcacgccttcggcgttttgcgcaatgtagttagcatcgcggtcttctttcatcagtttggcgatgcgatcaaacgcctcttcccaactgatttgctgccatttatcagaacctggcgcacggtattccggaaacttcagacggctttcggagtggatgaaatccaccaggccagcgcctttcggacaaagtgcaccgcggttgaccgggtgatccggatcgccttcgatatggaagatagatgctttggcgttttttgctccgtcaccgaggctgtacatcaacagcccacagcctacggaacaataggtgcaggtattacgggtttcgcgggtgcgcagcagtttatactgccgggtttccgcgagtgctacgctgggtgcaaaacccagtgccgctgccgtggtgcctgccataccgccagcgcagatcttaaagaactgccttctgctgacctgcatggattgctccttgtttcgacattgtcacgtcccatttacattcgcttgctgcgtgtgcagggagtgggagttatttttctttgcggaaggggccgcaaaggtccagaattggctcaatttccctccatccaggaagggtttgtaacagaataccataatgttggtgtgtgtgttcttatctggttaagagaaagtgaaaaaaacacagcgaaaagaaatcgaaaatgtgacaaatatcacaggtgttcgtcaaattgagttatggcggcgtgatgatttacaacacccacggttagatgaggtcgcggaagaagttcccgttgcgctggtctacaacggcattagccatgtggtgatgatggcgagccccaaagaccttgagtactttgcgctcggttttagcctttccgaggggattatcgaaagtccgcgcgatatcttcggcatggatgtcgttccttcctgtaatggtcttgaagtacaaattgagctttccagccgccgctttatggggttgaaggagcgccgccgggcgctggcgggacgtacgggctgtggcgtatgcggcgtggagcaacttaatgacatcggaaaaccggtgcagccgctaccgttcacccagacgtttgatctcaacaaactggatgatgcattacgtcatctcaacgattttcagccagtggggcaactgactggttgtactcacgccgctgcctggatgttgccatctggcgaactggtcggcgggcatgaagacgtgggtcgccatgtggcgctggacaaactgttaggccgccggagtcaagaaggggaaagctggcagcaaggtgcggtactggtttccagtcgtgccagttatgaaatggtgcaaaagagcgcgatgtgcggcgtagagattttgtttgcggtgtctgccgcgaccacgcttgctgtagaagtggctgagcgctgtaatctgacactggtaggtttttgtaaaccgggtcgggcaacggtttatacccatccgcagcgtttgagcaattaattaaaataagtcctgcgaaatatattaaattgcaggacttattcatttcgtgaattttattattttatttataaacaaaatgcgtgtagtggcgttttcttttttcatttattatgttcactctcttatctatatatttataaggcaattaaatgaaaaggaatttattatcttccgctattatagtcgccatcatgtccctcggtctgacgggttgtgatgataaaaaagccgaaacagaaacgctcccgcctgccaatagtcaacctgccgcaccagctcctgaagcgaaacctactgaagctcccgttgcaaaagcagaagctaaacctgaaacacctgcgcaaccggtggtcgatgaacaagcggttttcgacgaaaaaatggatgtctatatcaagtgctacaacaagttacagatcccggtacagcgcagtctggcgcgttatgctgactggctgaaagattttaaacaggggcctaccggtgaagagcgtactgtttatggcatctacggcattagtgaatccaacctcgctgagtgtgaaaaaggcgtaaaaagtgctgtggcgttaacgcctgcgctgcaaccaattgatggcgtggcggtgagttatatcgatgctgccgtggcgttgggtaataccattaacgaaatggataaatattacacccaggaaaattataaagacgatgcgtttgcgaaagggaaaacgctgcaccagacattcttaaaaaatctggaagcctttgaacctgtagccgaatcttatcatgcggcgattcaggaaattaatgataagcgtcagcttgcggaactgaaaaatattgaagaaagagaagggaaaacattccactactactctctggcagtcatgattagtgcgaaacaaattaataacctgataagccaagataagtttgatgcagaagcggcaatgaagaaagtgtctgaactggaaacgctagtggcgcaggccaaagaagcggataaaggcggcatgaatttcagctttattaatagcgcaggccagtatcaactcgaggctaaaaaatacgttcgccgcatcagagataaagtcccgtactctgactgggataaagagcaacttcaggacgcaaacagtagctggatggtcgaagactctttcccgagagcattacgcgagtacaacgaaatggttgatgactataatagcctgcgttaaacgtttttgatgataaatgcagtgtcggatgcggcgcatccgacacagttcaccccttgtgaagtaactccataaatgcctcatatcctgttaacccggcaataatctccgccggatgctgacacaatatgcttgccagatagctaaatatttttagctcatgacgcgcatcggcggcggcgcaggcgatcaagacatggttaatgacttcgttattcacctcaactggttgggcgagggtaataaaaaatccacgaaaacgtcgctcctgttcgctccagcaatgtgggatggcgaggcgattaacaatcaggttttcaccttcgccttcgcgggcgatgatgcgttgtgcttcatcggcggtaatatggtgttgtgcgactaattgcgcacaaatttgccgggtaatatgttgccagctttcaccgcgtacattgctataatgaaaacttccgggggcagagaaaaaacgctccggctgttggcgaataaatgccgtcgccagaaaatgttttatttgttcgataccggcagccgtaatgatattttttacggtgatgtaattatttaccgcgtcatccagtaaataatggctgttgttaatgatcaataacggctcaatctcttcgcgaatggcaacaagttcgcttaagctacgggcaataattacccgacaatttaaaacatcgcgctcaatggcgagctgattaatagtggcaatcgcgttctggtcgctgagcaaaatgatcggctggcgttcgttttgatgccgctccagcgcacaggcaaaatacaaaccgatcagatcgctgtcgaaaaggggaatatcgagctgttcacgcagtagcgtaataaagtgcagactcatatcaaaggccgcaggccaggcggctttcaggttattcatgctgctctggcggtgctcagcaatccacactggtgcggcaaggcaacgtaataaatgcccggtaatattctcaaccagctgcgcatcaataatattcaaactcgcgatgcccggcaccctttgcagcaacccctgcacattatcggcactaattacctgcgcttgctgatgctgtttctctatcaaacccgtcagggttcttacagcgttatcaccaagaaacagaccgctatgttcaacgatttgttttatctcgtcaccgggatattgcggccactcatcggtcagttgattacgcagggcgtaaatcgccagaatcaggctggagagataatcaccctgcatgagcggccagcggtgttggttgtcgcaggccgtggataaatgctgaaggttgtctcgtgttatgcccgccagcggaattaaaaacggatctttgcgcagcaagttcgccagcaagataacgcgtttctcttctgtctcatcaatgaaatggcccaaaccagggcggctggccaggcaacaagtgcgttcataacgctgttttaaccggggcagacgctctgctacccacgtttctggcaaattaagcgcgctggcgagttgcgcacggggagtgaaagtattcagtaataacagcgccagcagccgatcgtcgttatcgtgcttttgcagcaactgaaaaaagctgcggcgctcgaagatttccagctgatagcccgcactgccactggcgaaaatgcgggctttgccgttaagggtgaagttgagatagtcaatatcacgcaggatggtcctgccactaacgccagtctgttgcgccagctcgccaggcgtgcgcggctgttgctccagcagatcgacaatctttaactggcgttcgtttagcattaatccacctgacggaactggctaaacgcgttgactttctccgcagttaaggtcgtcagaaaaccccgtatcagcgtgagcagagcttcgtaatcggctttactaatcataccgctgttggcgtgcagataacgagttggcagacacagcgcgacaaccggacgcccgccgcccatcacgttgtagcgcccgccatccgtcgcaccggttttcatggtggaaaattgcagcggtaaatcgttatgtgcggcacagctttttaacgctgctaccagtttctggttggggaagtagcgcttgtcaaacagcatcagccccggcccctggcccagtttcagcgggtatttaatgttatcaatgcccggaacatcgcccgctacggcggtatccaacacgatcacgacgtccggtttaatgtgttccgcgctggtttgcgccccgcgtagcccaacttcttcttccacactgccaacgccatacagcgtaatttcgggattattcaccgtctgcaatagttcagccatcattgcgcagccgatgcggttatccaacgccttgccgaccactttatcttcgccccagcaggcaaaattggcttccgggctaataaaattaccaatttccacgccgcgcttttccacctcttcgcgactgttcgcgccaatatcaatgaacatctcatcaaaactcagcggttgttgcttttgcttttccgttaacgcatgaggcgcgacggaaccaatcacaccagggattttcactcccttgtgtgtgcgtatggttacccggtggttgagcatgctctgattccaccagccgccaatggtggtaaaacgcagaaaaccgctctcgtcgatgtgggtgaccataaagccgacttcatccatatgtccgacaacggcaacttttggacctttattccccttacgggcaacaaagctgcccagaccatcgaaggtgatttcattcacgcaaggttccagcgtgtttatcagaatgtcgcgaacttcctgttcatcgccgctgacggcgctggcttcgcacaactgttgcagtaactcaatgttcatggacaagctcctgttgcgcggctttcgctttgcggcgtaaccacaatcctttcaggacgataatgaaactaatgttcagcgcgaggccaatcgccagcaccagataaaagctacccaccgggctcatcaggccgatcagcgggtcaaagatacccaaaccaggtgccagacgtttgattccgaaagcgatcaccagcacgccggtaatgccgcccgccagcgtattggcggtaatcatcggcaacggagctgccagagcgtaaggaatagccggttcggttgcgactgtggcaccgaccacaatggcactactggcagcctctttttcctgtcgggtaaacagtttgggcgcaatgaacgtcgcaagacccgccgcgacgggcggcatcagcgcgacaacgccgacgatggcgtaccagtcataaatgtgtttttccagcagactgaagcagaagaaccaggcggttttattgatggggccgcccatatcgaacgccagcatcgcaccgaccagaaacgctgccgcaaacttcatacttggaggaatggtattcaggaagtggagcagcccgcccatgaggtcggacatcaccggcccgataacgtagtaagtgagcacgccgaaaaccagcagagtaacgaacgggatcagcatactaccgagcagcggttgtaatgctttgccaaggcgcactttgcggaaccagaagacgaaatagccaatcgccagccccagcaccaccgcgccgaggaatcccgcaccgctctgggtgccgagcagcgctttgtcgttcgccagatagcaaaccagaaacgccggagcgaaagccggtttatcggcaatgctgctggcaatataagcgcccatgatggggatcataaaggtgaagccaaggtaaccgatggattcaactacccaggtaaagctcggcgcgcctttgctcatatcggtatacggcaaaccgaactgcaccagcatgttggcaagcgccaccaggataccaccgccgatgacaaacggcagcgccgcagagacgcccgccatcaggtggctcatcacgctaccgctttgcacttcctgtttgccaagcttcacgccgctatctgcggcaaaaagctggctgtttgtcggtaattcgctgaaaatctggtcgatatttttcaacgcctgggagatggcaatctcataaactttcttcccggcaaaccgcgcgcgatcatcaccgctcaggccacgcccggtagcgagaatgacgtaatcggcagcggcaatctcttcgctggataagcggttttcaacgccactggacccttgagtttccacttttatggtatgaccgagagaacgggctttctgttccagggcttccgccaccatgtaggtgtgagcgatcccggcggggcagttggtgatcgcgacaatacgtaaggaactctccatcgccacttccttaactgctgagggtttgatttaacaaggcaagcacctggtcggtatcgccctgttgcagttgatgaataaattccttgtgaataattttgcgacacagtgtgccgatgattttgacctgatcctcttcgccgctttgcggcacgccgaggcagatccagcaattgacgtcttcgccatcgctggctttccagtcaatagcctgcgctttgcgggcgaataatacgaacggttgtttaacgcaggcgcttttaccgtgcggcacggcgacaccggaaccaaatccagtagagtgcattttttcgcgcagcagcagggtttgcaggaactggtgactgtcggtgataaaaccgttttgtaacgctattgtcgccaactgcttcagaacggaataagcgccattgccctgaatattcaggtcaatacagcttgcagtaagagctgccattaatcggactccataaaatatattttaatcaattgtaatggtggagcgattaagtgatgagaggcgatatgtcggtaaacaatgacaatttgagacagagtgaaaggtcagatttgcggagtaatgcacataatggttatttaaataaaccacatgaatcattaatgggttattcattatttttgtgatttactcacaatgtatcagggaaatataacttaccgggagatgtaatatgtttaatttttcaaatcgaaatttaaaatattgtgccggaggcatctctggcacattgggcaattacggcaggtaaaacacttcttgcagctcgctactcaccgggctgttatccgggttagcgggcataacatcggtcatatatttccaccaacgttggcagacatcagtgctggcaaccgcattccagcgttcttcagattcaatctctaccatggcaaacagcagattacgcgctttgtcgagatagatggcgtagttatgcgcaccgtgagatttcagcactgcttccagttctggccagatgggattatgccgacgctgatactcttcgtgggcgtcggggtttacctgcatgacaaaggctttgcggatcatgtttgctccttacagcgccagcgcactggcgagtggcgtaacgccgaaacgcttgccgagcgctatcaactcttcacggctgatggtctgtttcatgccgcccatgctataaaccttcactaatacttgtgcacttttttctgcggtgtcgattaaaccgaaggtttcatccagcgtcggtccgctgccgaagacgccgtggaagggccacaacaccaggctatgtttttgcatctcttgtgcggtcgcctggccgatttcgtccgtgccgggcaccatccacggcaaaatgccaacgccatccgggaataccaccagacactcggtgctgccttcccacagttggcgagtgaagaccgcggtgtcgttttcaagtacataggtgagggcgatcaggttggtggcgtggcagtgcatgatcacccgatctttgccgttggtggctttaatgcgctcgcagtgggaaaggaagtgagccggaagttcggaagtggggacggcttcgttggttaacccccaaagaatgtggtagcccgcgccgtcgctgtcgacttttacgatgcctaagttagccgcaggatcaagctggacgttacggaagaatttgccgctgccggtgacaataaacggtgtatttgccagtaaaggcatgggctggctgagcgggatatagcgcggttgttggtggaaattgtcgtgatatggtgcgatatcggcgtcatccaggcgtagcgtcaggttgccgccgttgcgctcatcccagcctttcagccaggcgtcggtggtggctttgatcattccctggacaaaccaggactgagtaatgttttgcatgttctgtgttcctgtaaattcggtgttgtcggatgcacgacccgtaggccggataaggcgctcgcgccgcatccggcaatcaatgcctgatgcgacgctgtcgcgtcttatcaggcctacaactattgccgacctgtaggcctgataaggcacttgtgccgcatccggcaatcaatgcctgatgcgacgctgtcgcgtcttatcaggcctacaactgttgccgacctgtaggccggataaggcacttgtgccgcatccggcaatcaatgcctgatgcgacgctgtcgcgtcttatcaggcctacaactattgccgacctgtaggccggataaggcacttgtgccgcatccggcaatcaatgcctgatgcgacgctgtcgcgtcttatcaggcctacaactgttgccgacccgtaggccggataaggcgctcgcgccgcatccggcagtgtttacccgcggcgactcaaaatttctttctcataagcccgcacgctctccagccattcgctacctgctggcgtatcgtgacgttggcaatacatttcccagaccgcctgccacggcaagcttttctgctcttccagcagtgccagacgcgcagtgtaatcgcccgccgcttccagcttgcgcagctcagcggtaggttccagcaacgcacgcagcagggcttttttcatattgcgtgtaccaatgacccacgcggcaatgcggttgatagaggcatcgaagaagtcaaggccgatatgcacccggtcaaacagatcgtgacgcacaatctcactggcaattgcctgggtttcatcatccagcagcactacgtgatcgctgtcccagcgaaccggacggctgacgtgcagcagcaactgcggcacatacagcatggcggcggaaatcttgtcggaaatcacttcagtcgggtggaagtgcccggcgtccaggcacagcgcagtctggcggctggtggcataccccatgtaaaactcattggagccaaccgtgtagctctctgcgccaatgccaaacaatttgctctcaacggcgtcgatatggtgcgcagggtttagcttctcgctgatcacctcatccagtgctgccagcagacgctgacgcggggcgagacggtcaacggtgatatctttcataccatccgggatccagatgttcatcacgcttggtgtgccgagttgctcgccaaaataggcgctaacgcgacggctggctttgcagtgatcaatccagaactggcgaatgctgtcgtcggcatgggaaagcgtaaagccatcggcgcttagcggatggctaaagcaggaggggttaaaatccagaccgagctgattggctttcgcccattcaacccagtttttgaagtgctctggtttgatctggtcgcggctgactggcgtatcactttccagatagatggcatgtaaattaagccgtttcggccccggaatcagccgcatagcctgttccagatcggcacgtagctcactggcattacgcgctttgcccggataattgcctgtggcctgaatccccccggtcaggctaccttccgggttttcaaaaccggaaacatcatcgccctgccagcagtgcatactaacgggtaaacgatcaagttggcgcagcgcctcctcgacatcaatccccaccgccgcgaaacgctgtttcgctagctcccaggcctgttccagttgagtggtcatgcgcaaagctcctttgtctgtcgtgtagagtgaatctgcgccacatagtgggcaatttcactgtcaggattaggggtaaaggtggtcagattcgcggtggtgctgacgacctgacggaaatcatccacattgttgagttcatccagcgtcattaactggatgccgatattgccgagcgtgctggcttcaacaggcccggcgatcacccgaataccgcaggcatcggcgcatagctggttgagcagcgtgttctggcagcctccgccgacaatatgcagttggctgaaatcttcaccgcgcagctgcgccagctcatgcaacacatcggcatacagcagcgccagactgtcgaaaatgcagcgcgccagttcagcatcactttccgggatcggttgcgccgtttcccgacacgcagcctgaatttcgctgcacatcgtctcaggattaataaagcgatcgtcattgggattgataatgaagcggcaagccggaagtgcctgtgtcgcggagataagcgccggaagatcgttgatttgctgctcctgaagcactcgctgaagcagccataagcccataatatttttcagcacccgatagcgaccttccgccccgccttcattggtgatgttggctgccagtgccgtgtcattggtaaatggcgtctggctttcgaagcccatcaaactccaggtgccagaagagagataagcagcacgactgccgtttaacgggctggcgataaccgcgctggcggtatcatggctggcaacggcgaccactggaatctcattaccctgcgggcaaatccagtgacctatgacattacccggatgcgtcgggcgaccaaaccaggctttgttggccccgctccacgccagtaggctctcgtcccagtcgtcgctattgatattgaccagttgcgtggtcgtggcgttggtatattcccagttcatcttgccggtcaggcgataactgaagtaatccggcatcagcagagcgtgagcaatgtgtggaataagttcaggttgttgctccgtcagcgcacgcaactgataaagcgtattgaagggcagaaactggatgccgctacgttgataaatatcgcgtttgccgagttgttgttgtgcctgcgccattaggccattggtgcggctatcgcgataagcaacgggcaggcccacacgctgaccctgttggtcgagcagcacaaagtccacgccccaggtatcaatcccaatgctatcgatacgaatcccttcctcgcacaccttgtttaatccaaggcgaatggcactttcaaggctatccacatcccaggtgacatagccgttctgactatgcagcccattgttaaaacgatggatttcgcgcagcgtcaggctgcggcattcacgctcgtaacgcgccagcatcacgcgcccactggatgcgccgagatcgacggcgacacaattgcgaaaggtcataatgtgatcctgctgaatttcattacgaccagtctaaaaagcgcctgaattcgcgaccttctcgttactgacaggaaaatgggccattggcaaccagggaaagatgaacgtgatgatgttcacaatttgctgaattgtggtgatgtgatgctcaccgcatttcctgaaaattcacgctgtatcttgaaaaatcgacgttttttacgtggttttccgtcgaaaatttaaggtaagaacctgacctcgtgattactatttcgccgtgttgacgacatcaggaggccagtatgaccgtattacatagtgtggatttttttccgtctggtaacgcgtccgtggcgatagaaccccggctcccgcaggcggattttcctgaacatcatcatgattttcatgaaattgtgattgtcgaacatggcacgggtattcatgtgtttaatgggcagccctataccatcaccggtggcacggtctgtttcgtacgcgatcatgatcggcatctgtatgaacataccgataatctgtgtctgaccaatgtgctgtatcgcagcccggatcgatttcagtttctcgccgggctgaatcagttgctgccacaagagctggatgggcagtatccgtctcactggcgcgttaaccacagcgtattgcagcaggtgcgacagctggttgcacagatggaacagcaggaaggggaaaatgatttacccagcaccgccagtcgcgagatcttgtttatgcaattactgctcttgctgcgtaaaagcagtttgcaggagaacctggaaaacagcgcaagtcgtctcaacttgcttctggcctggctggaggaccattttgccgatgaggtgaattgggatgccgtggcggatcaattttctcttagtctgcgtacgctacatcggcagcttaagcagcaaacgggactgacgcctcagcgatacctgaaccgcctgcgactgatgaaagcccgacatctgctacgccacagcgaggccagcgttactgacatcgcctatcgctgtggattcagcgacagtaaccactttagcacgctttttcgccgagagtttaactggagtccgcgtgatattcgccagggacgggatggctttctgcaataacgcgaatcttctcaacgtatttgtacgccatattgcgaataatcaacttcgttctctggccgaggtagccacggtggcgcatcagttaaaacttctcaaagatgatttttttgccagcgaccagcaggcagtcgctgtggctgaccgttatccgcaagatgtctttgctgaacatacacatgatttttgtgagctggtgattgtctggcgcggtaatggcctgcatgtactcaacgatcgcccttatcgcattacccgtggcgatctcttttacattcatgctgacgataaacactcctacgcttccgttaacgatctggttttgcagaatattatttattgcccggagcgtctgaagctgaatcttgactggcagggggcgattccgggatttaacgccagcgcagggcaaccacactggcgcttaggtagcatggggatggcgcaggcgcggcaggttatcggtcagcttgagcatgaaagtagtcagcatgtgccgtttgctaacgaaatggctgagttgctgttcgggcagttggtgatgttgctgaatcgccatcgttacaccagtgatagcttgccgccaacatccagcgaaacgttgctggataagctgattacccggctggcggctagcctgaaaagtccctttgcgctggataaattttgtgatgaggcaagctgcagtgagcgcgttttgcgtcagcaatttcgccagcagactggaatgaccatcaatcaatatctgcgacaggtcagagtgtgtcatgcgcaatatcttctccagcatagccgcctgttaatcagtgatattagcaccgaatgtggctttgaagatagtaactattttagcgtggtgtttacccgggaaaccgggatgacgcccagccagtggcgtcatctcaatagccagaaagattaattcgccatgccgatgccgacgatgttagcggcgacaataatcaccacacaaccgaggctcaacaccgttaccggacggcgtcctgcattgttccactctttcagcaccagcccgacgataccgccgcacaatacatagaaactcatatgcagcatccaactgatgtagtcatactgcgccggaatgcgggcgtggccccaggcatagaaaaagaattgcagataccacatcaacccgcccagtgtgctgagtaacacattgtgaatgatcaggctttttgccaggctgaagtcggcttttaggctcaaatccttcacttttgccagacgaataaaacagaaaccgaggttaatgatcgcgccgccgcccatgatgacaacatagcttggcagagcgacatacagtggatcgacgccaagtgcggcagcggcttcatgcatcggttttgcggcgttcatcgcaaaggacatcccggcagagaaaatgccgcacatcaccgccagcaccagcccttttttcagattgaactcttcggctttaatgcccatcttgcgctctttcaactgcccggcgcgagttacaatccctacgccaatcagcgccaccagaacgccgagcaacgtcatgcgtccgccttcggtgctaatcaacacatcgaaattgccgttgataattggcgtcatcagcgtaccgacaatcaacgtaatgccaatggcgatgccaattcccatgctcatgccgagataacgcatggtcaggccgtagttgatattaccgatcccccacatagcgccgaacagaaaaacaggcagtcgcgtagagagactaaagctgctgtaatacgcccagaaattcggtagtaacagggcgctgatggcccacggcagaataatccagctaacaatcccaccgacactccacatggtttcccaactccatttttttacttttttgaacggagcgtaaaaacaggctgcactggccgcgccgatcaaatgccaaaatatccccatcgtaatcgcgttactcatcttcttatcctcatcatttttcgtcgcgtcacatctccgacgagatgagtgtaaaaatcgtgctgtcgattaacctttcgcctgttgccgccgttgtcgatttactggcaatcacggcattaagtgggtgatttgcttcacatctcgggcattttcctgcaaaaccatacccttacgaaaagtacggcattgataatcattttcaatatcatttaattaactataatgaaccaactgcttacgcggcattaacaatcggccgcccgacaatactggagatgaatatgagctataccctgccatccctgccgtatgcttacgatgccctggaaccgcacttcgataagcagaccatggaaatccaccacaccaaacaccatcagacctacgtaaacaacgccaacgcggcgctggaaagcctgccagaatttgccaacctgccggttgaagagctgatcaccaaactggaccagctgccagcagacaagaaaaccgtactgcgcaacaacgctggcggtcacgctaaccacagcctgttctggaaaggtctgaaaaaaggcaccaccctgcagggtgacctgaaagcggctatcgaacgtgacttcggctccgttgataacttcaaagcagaatttgaaaaagcggcagcttcccgctttggttccggctgggcatggctggtgctgaaaggcgataaactggcggtggtttctactgctaaccaggattctccgctgatgggtgaagctatttctggcgcttccggcttcccgattatgggcctggatgtgtgggaacatgcttactacctgaaattccagaaccgccgtccggactacattaaagagttctggaacgtggtgaactgggacgaagcagcggcacgttttgcggcgaaaaaataatcatttgccgcctgctgcaatgaggcgtataggccgcatatcagcttaaaaaatgaaccatcgccaacggcggtggtttttttgtgatcaatttcaaaataaaaacaatgatccgataaaaataaaacagcgtttcaattgatgtggttttgatcacttttattgattaaatgaatgtctatcttcgtttccatcaacactgatgctccattgaggaattacgcatcagcccttaaaaatatgccgacaggtgatggaaatgcagataaaacgcagcattgagaaaatcccggggggggatgatgctcgtcccgctattccttggcgcactgtgccacaccttcagcccgggggcggggaaatattttggaagtttcaccaacgggatgattaccggtacggtgcccattctggcggtgtggtttttttgcatgggggcgagtataaaattaagcgcgacgggaacggtactgcgtaaatccggtacgctggtggtaactaaaattgccgtcgcgtgggtggttgcggcaattgccagccgtattattccggaacatggtgttgaagttggattctttgccggacttagtacgctggcgctggtggcggcgatggatatgaccaatggcggactttacgcttccatcatgcagcagtacggcacaaaagaagaagctggggcatttgtgttgatgagcttggagtccgggccgctcatgacgatgattattctgggcactgccgggattgccagctttgaaccgcatgttttcgtcggcgcagtattaccgttcctggtgggctttgccctggggaaccttgaccctgaattgcgagaatttttcagcaaagcggtgcaaacgctgattccattctttgccttcgcgctgggcaataccattgatttgactgtgattgcccagactggtttgctggggatcctgttgggtgtggcagtaattatcgtgaccggtattccgttgattatcgccgataaattgattggcggtggcgatggcactgccggaattgccgcttccagttccgcaggggccgcggtagcgacacctgtgctgattgcagaaatggtgcctgcgtttaaaccgatggctccggcagcaactagcctggtagcgacggcggtcattgtgactagcattctggtgccaattcttacctctatctggagtcgtaaagtcaaagccagagcagcgaaaatcgaaattttaggtacggtgaaataaacctgcttccttaatccccacagccggatgaactaacgttcgtccggtttgctattgagttcctgcctggatacttaccgcgaaaacagcacgcctgacataaaataaatatggtctaatggggaaatttctcgtggagagggaacagatgcgatatccggttgatgtatacacaggcaagattcaggcttatcccgaaggcaaacccagcgcaattgctaaaatccaggttgatggtgagttgatgctgacggagctggggctggaaggtgacgagcaggcggagaaaaaggttcacggcgggccagacagagcgctgtgtcattatcctcgtgagcattatctctactgggcgcgggaatttccggaacaggcggagttgtttgttgcgcctgcgtttggtgaaaacctcagtaccgacggcctgacggaaagtaatgtttatatgggcgatattttccgctggggagaggcattaattcaggtcagccagccgcgcagcccttgctataaactcaattaccattttgatatcagcgatatagcgcagttgatgcaaaacacaggtaaggtggggtggttgtatagcgtgatagcgccagggaaagtgtctgcggacgcgccgctggagttggtttcccgtgtcagcgatgtgaccgtgcaggaggctgccgccatcgcatggcatatgccgtttgatgacgatcaatatcaccgtttactctccgctgccgggttaagcaaaagctggacgcggacgatgcaaaagcgccgactgagcggcaagatcgaagatttttcccgccggttgtggggaaaataacccccggagtgtaggcctgataagacgctatcagcgtcgcatcaggcatcctgctcaaatgccggatgcggcgtaaacgccttatcctgcctgcaaatgcgaagtttaactccgcttatacagcggcaaccaaatcaccagccgtaaaccgcccagcgggctgtcttctgccttcacccagccacgatgctgctgaatggcggtttcaacaatcgccagccccaaacctgtaccgccagattcacgatcgcgtgcttcatcggtacgatagaacggacggaaaatctgttcgcgatcttccgggctaacgccaggaccatcgtcgtccaccgtaatggtgataccgtctttatctaccgcaaagcccacttcaatcttcgtatgggaataacgcagagcattacgaacaatgttttccagcgcactttccagggcgttcggattgccgtacagcggccacggcccaggcgggaagttaactgtcaagctcttgcccatttgctcggcttcgaacgccgcgttatccagcacttcactccacaactggttggctttgatggtttcgctaaccagcgcgtttttttgctgattacgactcatcaccaacagatcgttgatcatgctgtccagacgttgcgcttcggtttcaatacgctccagttccttgctttcaccgctacgacggcgcagtaacgccgtacccagttgcagacgcgtcagcggggtgcgcagctcgtgagagatatcagaaagcagacgctgctgagaggtcatcatgcgctccagcgcggtgaccatctggttaaaactggcacctgcggcaaggaattcctgtggccccgcttccagttccgggtgctggcgtaagtttccctgggcaacttcatcggcagcgtttttcagcttacgcgccggttttgccagactccaggccaaccacaacagcagcggcgtactgaccaacatggtgacaatcagcagtaatagcgggcggtcaaacagtaagttaatgaaatcggattgagaactgctggccggacgaatcagataaagttggtaattatcttcgccatcacgcacggagaacggaccgaccagttccacgcggccatactttttcttctgcggatgatcggcgttatcggcctgaccaataaagttacgaatgatctgcatttcgctgcgttcagcgccgatcacgcggccttcggtggtcaccaataacaaacgctgtcctggcggtgcccacttatcaatcgcccggaacagacgccgccaccacattaaatcgttgggcggatcgttcgccagctccgcttcgacatgctgctcaatcatcagcccctgacgctgttcgctatccagaagctcggtcatctggcgactatcgagcttgggtaacatcaaaaccaacatcaacaccagcgccagcgtcagccagaagatggcgaagatgcgcgcggttaagctgcctatcatgaagcagaaaccatcagatattagctcaactagcagaaaccatcagatagccgcgaccacgcaaggttttaaaccacgggtgaccatctttacgatccggcagtttacgacgcaggttggaaatgtgcatatcaatagcgcggtcgaaaggcgtcaggcgtttgcccaacacttcctggcttaaatgttcacgggaaaccacctgacccagatgctgtgccagcaaatagagcagggtaaactcagtaccggttaactccagcgtttgcccgtcgaagctggcttcctgacggcctggattcagcactaaggcatcaacttccagtgtcggactaccgttgtcgttgttttgctgttgctcgctccagtggctacggcgcaggatcgcgcgaatacgtgccaccagctcacgatcattaaacggtttcgggagatagtcatctgcgcccagctcaaggccgagaacgcgatcaagttcactgccgcgcgccgtcaacataatgacaggcgtctggtgtgtctggcgaagtgcttttaatgtgtcgataccatttttcttcggcatcattacgtcaagcaaaagtaaatcaatgctgtcgtccagaagatcaagcgcctgttccccatcgtgggcaacaatcacgttgaagccttccatctcgagcagctcctttaatagggaagtcagctctcggtcatcatcaactaacaggattttattcattgtttaaatacctccgaggcagaaattacgtcatcagacgtcgctaatccatgactttacgttgttttacaccccctgacgcatgtttgcagcctgaatcgtaaactctctatcgttgaatcgcgacagaaagattttgggagcaaatgatgcgcatagttaccgctgccgtcatggccagtacgctggcagtcagtagtttaagccacgctgctgaagtcggtagtggcgataactggcatccgggtgaagaacttacgcagcgcagtacgcagagccatatgttcgacggcataagtttaaccgaacatcagcgtcagcagatgcgagatcttatgcaacaggcccggcacgaacagcctcctgttaatgttagcgaactggagacaatgcatcgccttgtcaccgcagaaaattttgatgaaaacgctgtgcgcgcacaggcagaaaaaatggcgaatgagcaaattgctcgtcaggttgagatggcaaaagtccgcaaccaaatgtatcgcctgttaacgccggagcagcaagcggttttaaacgagaaacatcaacaacgaatggagcagttgcgtgacgtgacgcaatggcaaaaaagtagtagcttgaagctattgagtagtagcaacagtcgttcccagtaataaaccctgttttccttgccatagacaccatccctgtcttcccccacatgctgtgggggttttttttatcctcaatttgcctgctgcttaatgcattgcagatgatttgcttccgttatactagcgtcagttgatagcgggagtatttatgaatcaatcttatggacggctggtcagtcgggcggcgattgctgcgacggcgatggctagcctgctattgctgattaaaatttttgcatggtggtataccgggagcgtgagtattctcgccgcgctggtggatagcctggtggatatcggcgcgagcttgacgaatttattggtggtgcgatattccctgcaacctgccgacgataatcacagctttggtcacggtaaagctgagtccctcgcggcgctggcgcaaagtatgtttatctccggtagcgcactattcctgtttttgacgggtattcaacatctgatatctccaacaccgatgacagatccaggcgtcggggttatcgtgacaattgtggcgctaatttgtacgattatccttgtcagctttcagcgttgggtggtgcggcggacgcaaagccaggcggtgcgggctgatatgctacattaccagtctgatgttatgatgaacggcgcaattctgctggcgctggggttgtcctggtacggctggcatcgcgccgatgctctgtttgcattgggaatcggcatctatattttatatagcgcgttacgcatgggatatgaggcggtacagagtttactggatcgcgcattgcctgatgaggaacggcaagaaattattgatatcgtgacttcctggccgggtgttagcggcgctcacgatcttcgcacgcggcagagtgggccgacccgctttattcagattcatttggaaatggaagactctctgcctttggttcaggcacatatggtggcggatcaggtagagcaggctattttacggcgttttccgggaagcgatgtaattatccatcaggacccctgttccgtcgtacccagggagggtaaacggtctatgcttagttaatcagtataaaagagagccagacccgcattttgtgtataaaataccgccatttggcctgacctgaatcaattcagcaggaagtgattgttatactatttgcacattcgttggatcacttcgatgtgcaagaagacttccggcaacagatttcattttgcattccaaagttcagaggtagtcatgattaagaaaatcggtgtgttgacaagcggcggtgatgcgccaggcatgaacgccgcaattcgcggggttgttcgttctgcgctgacagaaggtctggaagtaatgggtatttatgacggctatctgggtctgtatgaagaccgtatggtacagctagaccgttacagcgtgtctgacatgatcaaccgtggcggtacgttcctcggttctgcgcgtttcccggaattccgcgacgagaacatccgcgccgtggctatcgaaaacctgaaaaaacgtggtatcgacgcgctggtggttatcggcggtgacggttcctacatgggtgcaatgcgtctgaccgaaatgggcttcccgtgcatcggtctgccgggcactatcgacaacgacatcaaaggcactgactacactatcggtttcttcactgcgctgagcaccgttgtagaagcgatcgaccgtctgcgtgacacctcttcttctcaccagcgtatttccgtggtggaagtgatgggccgttattgtggagatctgacgttggctgcggccattgccggtggctgtgaattcgttgtggttccggaagttgaattcagccgtgaagacctggtaaacgaaatcaaagcgggtatcgcgaaaggtaaaaaacacgcgatcgtggcgattaccgaacatatgtgtgatgttgacgaactggcgcatttcatcgagaaagaaaccggtcgtgaaacccgcgcaactgtgctgggccacatccagcgcggtggttctccggtgccttacgaccgtattctggcttcccgtatgggcgcttacgctatcgatctgctgctggcaggttacggcggtcgttgtgtaggtatccagaacgaacagctggttcaccacgacatcatcgacgctatcgaaaacatgaagcgtccgttcaaaggtgactggctggactgcgcgaaaaaactgtattaatgatttcggaaaaaggcagattcctttaccctgaaaccgatgacagaagcaaaaatgcctgatgcgcttcgcttatcaggcctacatgaattctgcaatttattgaatttgcaaacttttgtaggccggataaggcgttcgcgccgcatccggcatggacaaagcgcactttgtcagcaatatgaggcggatttcttccgcctttttaatccctcaacatatacccgcaagttatagccaatctttttttattctttaatgtttggttaaccttctggcacgctttgctcatcacaacacaacataagagagtcgggcgatgaacaagtggggcgtagggttaacatttttgctggcggcaaccagcgttatggcaaaggatattcagcttcttaacgttagttatgatccaacgcgcgaattgtacgaacagtacaacaaggcattcagcgcccactggaaacagcaaactggtgataacgtggtgattcgtcagagtcacggtggcagtggtaaacaagcgacgagcgtaatcaacggtattgaagctgatgttgtcacgctggctctggcctatgacgtggacgcaattgcggaacgcgggcggattgataaagagtggatcaaacgtctgccggataactccgcaccgtacacttccaccattgttttcctggtacgtaagggaaatccgaagcagatccatgactggaacgatctgattaaaccgggtgttagcgtgatcacgcctaatccgaaaagctctggtggcgcgcgctggaactacctggcagcctggggctacgcgctgcatcacaacaacaacgatcaggcaaaagcacaggattttgttcgggcactgtataaaaacgtcgaagttctggattctggcgcgcgtggctccactaacacttttgtcgagcgcggaattggcgatgtactgattgcctgggaaaacgaagctctgctggcagcgaatgaactggggaaagataaattcgaaatcgtcacgccgagtgagtctatcctcgcagagccaaccgtgagcgtggtcgataaagtggtcgagaaaaaaggtactaaagaggtggcggaagcctacctgaaatatctctacagcccagaaggtcaggaaattgccgcgaaaaactactaccgtccgcgcgacgctgaggtggcgaaaaagtacgaaaatgcgtttccaaagctgaagttattcaccattgatgaagagttcggcggctggacgaaagcgcaaaaagagcattttgctaacggcggtacgttcgatcagatcagcaaacgctgatttccccaggataattatcaaacccggtggtttctcgcgaccgggttttttatttgtcacgattttgcgttacccttgcatctctttgaggtacagggaaaaaaagatgaaaaaagcgggtcttctttttttggtgatgatagttatcgccgttgtggctgccggtattggttactggaaattaaccggtgaagagagcgatacattacgtaagattgtccttgaggaatgtttgcccaatcagcagcaaaatcaaaatcctagcccatgtgcggaagtcaaacccaatgccggatacgtggttttaaaagatcttaatggcccactgcaatatctgttgatgccaacgtatcgtattaacggtactgaaagtcctttgttgaccgatcctagtacgccgaacttcttttggttggcttggcaggcgcgtgattttatgagcaaaaaatacggccagccggttcccgatcgcgcggtttctttggcgatcaactcccgcaccgggcgtacgcaaaaccattttcatattcatatctcttgtattcgtcctgatgtgcgcaaacagctggataacaatctggcgaacatcagcagccgctggttgccactgccaggtggtttgcgcgggcatgaatacctggcgcgtcgggtaacggaaagcgaactggtacaacgcagcccatttatgatgctggcagaagaagtacctgaggcgcgggaacatatgggacgctacgggctggcgatggtacggcagagtgataacagttttgtattgctggcgacacaacgaaatctactgacgcttaaccgtgctagtgccgaggaaattcaggatcatcagtgtgagattttgcgttaaggcgaagagttaaggaaagtaagtgccggatatgaaatccggcacctgtcagacttaagcctgtttagccgcttctgcagctttaacgattactgcgaaggcgtcagctttcagagaagcaccaccaaccagcgcgccgtcgatatccggctgagcaaacagttctgcagcgttagacgcgtttacagagccgccgtactgaatgatcacttgttcagcgatgttagcgtcaactttagcgatgtggtcacggatgaatttgtgaacagcctgtgcctgagccggagttgcagatttgccagtaccgattgcccatacaggttcgtaagcgataaccgcaccttcgaatgccgcagcaccctgagttttcagtaccgcgtcgatctgacgtgcgcaaacttcttcagttttgcccgcttcattttcagcttcggtttcaccgatgcacagaaccggagtcaggccctgctctttcagcaccgcgaattttttcgcgatcagttcgtcagattctttgtggtaagtacgacgttcagagtgaccgatgatgatgtactgtgcgccgatgtctttcagcatagcagcagaggtttcaccggtgaatgcgccggacaggttcaggtccacgttttgcgcacccagcatgatgtggctgccttcagcttcgcgcttcgccatatcgatatacatttccggtggtgcgattgcaaccgcacagccagcaacacctgccagctctttacgcaggttagaaaccagctcgtgaaccatgtggcggctgccgttcagtttccagttacccatcactaaaggatgtcgcattttaattctccacgcttataagcgaataaaggaagatggccgccccgcagggcagcaggtctgtgaaacagtatagagattcatcggcacaaaggctttgctttttgtcatttattcaaaccttcaaggctttcagatagcgccagcttaatcggttcaacagcgaaggtcagccccttttcgccgttgtccgcgacaacataacgcagtgcaccttctgtctcggtgtaataacgtttgtttttccccgccgttagtaggctctgcagttttttctggctttgtgttttggtcattaatggggtgagtgtgcggatcaccgctgccatgtattcctgagctttcgctttcgcggctttttgctctggcccctggatgggtagccaggtcatttgaatgcttttgatttttaaggtaccgcgctccagcgctgtagaagcatacaagttctcattaattttacttgcagcacgagtgagattggctttgtcgggactgctgtcgatggcacgaaattcgttcagtggcaggctgggattctggctgttaaagtcttctcgaaactggctgatggagagatcgaaagtaggggctccagccagcagataaggcgcggtcgttgccgtatctggtgtttgtgcatgcgcctctgttgtaacggttaatgcagaacataagagaaaaaacagcgtacaccctggcttcattgacagtaccttttgttatgactggctccgattaaaacgatatctgtcgcccttgtcaaaagggtagaatcctggaaaagacaaccatcaaggaacttacatgaccatacagcaatggttattcagttttaaagggcgtattggacgccgtgatttctggatttggataggcctgtggttcgcaggcatgctggtgcttttcagtctggcgggtaagaatctactcgatattcagaccgcggcgttttgccttgtgtgcttgctctggccaacagcggcagtaactgttaagcgcttgcatgatcgcgggcgttccggcgcatgggcatttctgatgattgtggcgtggatgctgctggcgggtaactgggcgattttaccgggtgtctggcaatgggcggtggggcgttttgtcccgacgttgattctggtgatgatgcttatcgatcttggtgcgtttgttggcacacaaggcgaaaataaatatggtaaagatactcaggatgtgaagtataaagccgacaataaaagtagtaattaacctttaatatatctcttactgctatttttttccgggattgttatttccacgatgcaaatgacaatacccggaaaatccttctgaactcttcaccttaagcaatatcaaaaaaaatggtaatccataagatcattacttgtttgttcttcccttaacggcgcattattcttaagtcgtaatcgacagagaggcgaatatacagaggtgccctatgaaagatgtcgtagataaatgcagtactaaaggatgtgcgattgatatcggtacggtgattgataacgacaactgtaccagtaagtttagccgcttttttgccacccgcgaagaagcagagtcttttatgaccaaactgaaagagcttgccgccgctacatcctctgcagatgaaggggccagcgtggcctataagattaaggatctggaggggcaagttgagcttgatgcggccttcactttcagttgccaggccgagatgattatttttgagttaagtctgcgtagcttagcttgatggagttgctttagaaggagttaaacatggcttataaacacattggcgtggcaatttccgggaatgaagaagatgccttactggtgaataaagccctggagctcgccagacataatgacgctcacctgacgttaattcatattgatgatggcttaagcgagttgtatccgggtatctacttccctgcaacagaagatattcttcaattgttgaagaataagagcgataacaagctgtataaactgacgaaaaatattcaatggccgaagacaaaactgcgtattgaacgcggagaaatgccggaaacactgctggaaattatgcaaaaagagcagtgcgacctccttgtctgtggtcatcatcacagttttatcaaccgtttgatgccggcatatcgcgggatgatcaataagatgagtgcggatttgctcatcgtgccgtttatcgataagtaaccgcttaccagtaatgctccgctgtcatatggcccggtcggcgacgtaaatgtttcgtcatctgccgggtctctttcagcaactgttgtgtatcgcgcaccatctgtggattgccgcacagcatcacatggctggtttctttattcatcggcaggccaatcgtgctttccagttccccactttcaattaatgccggtatccgtccggtgaggctccccgctgccgtttcccgactgaccaccgtctgaatgcgcagttttccttcgtagcgtttttccagttcctgcatcagtggcaaatagcttaagtcggcggcataacgtgcggcgtgcaccaggaccagatttttgaagcgatctaaatctttacctagttgcagaatgcttaaataagggccaatcgctgtaccggttgccagcatccatagcgtttcgcagtgcggcacttcatcgagcacaaagaatcctgccgcttcgctaaccacctgcacttcatcgcctggtttcagtgccgccagtcgtgggcttaatttgccatcggggacggtgaccaggtaaaactccagatcgggattatcggggctgtttacataggagtaggcgcgctggacgcgttcgccgtcgatttcaaggccaagcttggtaaattgcccggcggtaaacggaagcacgggggcgtgaacggtgagactaaacagggcgtcggtccagttctgcactttagtgactttgcctgttacccaatcagccatgtttttctcctgttttgattgacttgccttatcttcgttctccgaacaaaaaaattccagtcccgaaggactggaaggctcaatcgatcaaatcaatcagaggatgtgcacctgcatttccgggtctttgcgatccagatagtggatggactgaatgcggcgaatggtgcgactcttgccgcggatcagcagcgtttcggtagtcgcgatattgcctttgcggctaatgccttccagcagatcgcctttggtaataccggtggcagagaagatgacgttatcgctgcgcgccatatcgcccaggcgcaatactttaccggcttcgatgcccatcgctttgcagcgtgccagctcctgctcgccaatgcgacgattctcttcgttgtcgcctttgacgtcatgacgcgccagcagacgaccgttcatgtcgccatctaatgcgcggatcaccgccgcagaaactacgccttccggcgcgccaccaataccgtacagcacgtcaacttcgctgtctggcatacaggtgagaatactggccgcaacgtcgccgtccggaatagcaaatacgcgtacgccgagttgctgcatttcagcgataacggcatcgtggcgtggtttagccagaatcgttaccgtcagttcgctcaacggtttgccgagcgccgccgctacattgcgcaggttatccgccagcggcaggttcagatcaatggtgcctttggctcccggcccgacaatcagcttctccatatacatatccggcgcattgaggaagcagcctttatcgcctactgccagcaccgccagcgcgttagcctggcccatcgccgtcatgcgcgtgccttcaatcggatcaacagcaatatctaccgcgtcgccgcgaccagtaccgactttttcaccaatgtagagcatcggtgcttcgtcgatttcaccttcaccaatgacgatggtgccgtcaatgttgacctggttgagcataatacgcatggcgtttaccgccgcgccgtccgcggtgtttttatcgccgcgtcctaaccatttgtagccagccagcgccgcactttcggtgacgcgggaaaattcgatggcaagttctcgtctcatagcaaactctaagcagtaaggaatggcgcgaagtgtagcacaggggaagggagggattattgatgtgtgcggggttgcccccgcacgtttcgggactaccggatgcggcataaacgcttcattcggcatttacattattcgtcgtgttcttcccacgccatcgcgcgtttaaccgcttttttccagcctgcgtaacggtaattacgctcagtggtttcgatgcctggacggaactcgcgctcaatcaccgctttctcttgcagctcgtcgaggttctgccagaagccaaccgccaggcctgcgagataggccgcacccaatgcggtgacttcgcgcacttccgggcgctcaacgcgggtgccgagaatatcggactggaactgcatcaggaaattgtttgctactgcgccaccatccacgcgcagggcgtgcagacggataccagagtcggcctgcatcgcttccagcacgtcacgcgtctgataagcaatagactccagcgtcgcgcgtataatgtggttagcgttcaccccacgagtcagaccgaaaatcgccccgcgcgcatacgggtcccagtacggcgcacccagcccggtaaatgccggaaccacatacacaccattggtgttttgcactttggtggcgaaatattcggaatcgtaggcgtcgttaatcaacttcatttcatcgcgcagccactgaatggatgcgcctgccataaacaccgcaccttccaacgcatagttcacttcgccagtcgggccgcaggcgatggtggtcagcaggccgttttcacttttcaccgctttctcgccagtgttcatcagcataaagcagccagtgccataggtgttcttcgccatcccttctttcacgcacaactgaccaaacagcgcggcctgctggtcaccggcgatcccggagattggaatacgcgtgccgcctttgccgccaatgttagtctgaccgtatacttcggaagaacgacgcacttctggcagcatctcgcgcggaatatccagcacttccagcattttgtcgtcccagtccagggtatggatgttgaacaacatggtacgagaggcgttggtgtaatcggtcacatggacacggccctgagtcattttccagataagccacgtatcaaccgtaccaaacagcaattcaccacgacgtgcacgctcgcgagagccttccacatggtcgaggatccacttcactttggtgccagaaaagtacgggtcaatcaccagaccggtattgctgcggatataatcttctaaaccgtcacgttttaaatgctcgcagatttctgcggtacgacggcactgccagacaatggcgttatagataggcttgccggtttctttttcccagacaatagtggtttcacgctggttcgtaataccgatagctgcaatttgatcggaactgatatcggctttcgccagcacttctaccagcgtggagctttgggtggcccagatttccattgggtcgtgttctacccaacctggttttgggtagatttgctcaaattcgcgctggctcacgctaatgatattggcatcgtgatccattacgaccgcgcgggagctggtggtgccctggtcgagcgcaacgatatattttttttcagtcatgtttaattgtcccgtagtcatattacaggctagctttttgttcactaggagttgtggtttccttttcttccacaacacagatatcgcaaggcaaatggcgaccaatcagtttgcggtaggcaaatgcacctacaatcgcgccaacgatagggccgaaaagcggcaccaggaagtaaggaatgtctctgccgccggtaaaggcgacattgccccagcccgccagccaggcaaagactttcggaccgaagtcacgcgctgggttcatggcaaaacctgtcaatgggcccatagatgcgccaatgaccgcaatcagtagaccaatcagcaagggagccaaagggccgcgtggtacaccgttgccatcgtccgttaacgccaggatcagccccatcagaatagcggtaatcaccatctcaactgcgaaagcctgcacaaaattgatatgaggattagggtaagtagagaaagtgccagccagatcaacactttcaacgctgccgcgaacaatgtgatgagtctgctcgaagtcgaaaaataaattgtagtaaagcccgtaaactaaagccgcagcacagaaagcgccggcaacttgactaacgataaaaggaataactttgcgcttgtcgaaacaggcaaacagccacaatgcaatggtaacagcgggattaagatgcgcgccggaaacccctgcggtcaggtagatggccattgccacccccagtccccaaatgacactgatttcccactgaccaaaagacgcaccagcgacttttagtgctgcaacgcaacccacaccgaagaaaatcaacaacccggtaccgaggaattcagcaatgcactggcctttcaaggtacttgtttgactcataatcggatcctgaagagttaatgtttgttgtatgcgtgaaagtcacggacctccacgatgcttgtaggcatgctgtaaacttatcgttaacgagcaaaaacgagaaatatcgaacttaaaatgtgtgtgcctcgtcataaaatgagcgttatcgcgccatttattccatctgattgtacatgatgcatgtttgttagatcattcgcgcaacaaatttattaacattttcgattgatgtggattatgtcaccaggagaaggatgaaaagtgtggcaaaccgtaatctgcaaggcgtgccgctggacagcgatggcgcggcttcatacaatcggagctaactaaagtgcgctcgtatttattaaggcgtcaccggtaatcgggacgaggatttttatccatcaacgccttgcaattcaggagaggtatgacaatgagtttagaagtgtttgagaaactggaagcaaaagtacagcaggcgattgataccatcactctgttgcagatggaaatcgaagagctgaaagaaaaaaacaacagtctgagccaggaagttcaaaatgcccagcatcagcgcgaagagctggagcgtgagaacaaccatctgaaagaacagcagaacggctggcaggaacgtctgcaggccctgctgggtcgcatggaagaggtctgattacgcttcatcttccgcgtaatttctttactgtgtaggccaacaggtaacgcagaaaaaaggcaccttgcggtgcctttcttatcattcaatatccagcggatcttcactaagaataatcccggtattgtcggcataaagatggtcgccggagaagaaggtgacaccgccaaaattgacgcggacatcgctttcgccaatgccttcgccagcggcaccaaccggaattgccgccatcgcctggatgccgatatccaactcttccaggtcatctacctgacgcaccgcgccgtaaatgaccagaccttcccattcattttgtactgccagacgcgccagttcagcatcgaccagtgcgcgacgaacagaaccaccgccatcgacgacaagaacacgaccacggccattctgttcgagcagatcgtacagcaacccgttgtcctcgaaacattttaccgtgattatttgtccgccaaagctcgcccgtccgccaaagttggagaacagcggttccacgacgttaacatcttcttgatagatgtcacaaagctcggaagtatcgtatttcataggcttaacattcagttgctgcgagaattttcagtatatcgcgctatgtgggctgttggcaaaatcatcaattgttaattgatatttgtcagttatgctgcccactggcttaggaatatccctaaaacaaacagcaggttagtcagtaacgctcccttgacagtacgttccagcattggtcgcatcgccaccgggtccatttcccgcatcacataacgggcttgcttcaccagtaatggtgccgccagcaggaacagccagccccacaggctatgcaggctaaagagattaaacagcgccagacacaccaggctgcccatcagcaggcaggcatgataacgacgcgcgttcacttcacctaagcgcaccaccagcgtgtttttgccattttcgcggtcgctattgatatcacgcaggttattaatattcagtactgccgttgccagcaggccgcatgcggtcgccggaaggatcagtgccggaatcaatgtatgagcctgtaaataccagctccccatgacactcaaccagccaaagaaaaccagtacggaaatatcacccagaccgatataaccataaggacgattgcccacggtgtaggtgatagcggcaatgatgctcaacccgccaagaatcaggaaaccgacaaaatcggccagcgtatggcatgccactgcaaccagtgccagcccggagagacagatgagcacgacggtaataatgagcgcccgtttcatctcttgctgggtaatgacccctttttgcatgccgcgtagcggcccaatgcggtcaggtttatcgctgccttttaccgcatcgccgtaatcattggcgaggttagaaaggatctgtaatagcccggcggtaattagtgccagcagggcgaccagcggatcgaagtgaccttgccaccatgccagcgctgtcccgacgataattgcagcaaaggcgagggggagggttttaggtcgtaaactttccagccacgcctgagttcggctaatttgttgttcagtcataatacgcgccaataaaaatggggcctttcagccccatcaaacaatgatgaaaatgattgaacgcgattataggataaaacggctcagatcttcatctgccaccaacgcatccagatgtttgctcacataatctgcgtcaatagtgatattttgaccgcttaaatcgctggcgtcgtaggaaatctcttccattaaacgctccagaacagtgtgtaaacgacgagcaccgatgttttcggtagattcgttcacctgccatgccgcttccgcgatgcgtttaataccggagtcggtaaactcgatatttacgccttcagtcgccatcagtgctttgtactgcacggtgatagaggcattcggctcggtcagaatacgctcgaagtcgctggtggtcagcgcctgcagttcaacgcggattggcagacgaccttgcagttccgggatcaggtcagacggtttcgcaatctggaacgcgccagaagcgataaacagaatgtggtcagttttgaccatcccgtgtttggtggaaacggtgcaaccttctaccagcggcagcaggtcacgctgaacgccttcacgagaaacatccggaccggaagactcgccgcgcttacagattttgtcgatttcgtcgataaacacgatcccgtgctgctcaacagcgtcgatagcgtcttgcttcagctcttccgggttcaccagtttcgccgcttcttcttcaatcagcagcttcatggcgtctttgattttcagcttacgcgctttttgcttctggccgcccaggttctggaacatggactgcagctggctggtcatctcttccatgcccggaggagccataatttcaacgcccatcggtgctgcggcaagatcgatctcgatttctttgtcatcaagctggccttcacgcagttttttgcggaatgcctgacgagcagcggacggttcctgctgctgttcggtctgtccccagttgtttttagcaggtgggatcagcacgtcgagaatacgttcttctgccagttcttcagcgcgataacggtttttctcgatagcctggacgcgtaccattttcacggcggcatcggtcagatcgcgaataatagaatccacttccttaccgacgtagcccacttcggtgaatttggtcgcttcaactttgatgaacggcgcattcgccagcttagccagacgacgggcgatttcagttttaccgacaccggtcgggccgatcatcaggatatttttcggggtcacttcatggcgcagctcttcgttgagctgcatgcgacgccagcggttacgcagagcaatcgccacagaacgcttggcgttgtcctggccgatgatgtgcttatccagttcgctgacgatttcgcgtggggtcatttcagacatgggagatccttacgctttgtagcttaattcttcgatggtgtggaaatggttggtatagatgcaaatgtcgcctgcaatatccaacgccttttcagcaatttcacgggcgctaagttcagtgttttctaacagcgcgcgcgccgcagcctgggcgtaagggccgccggagccgatagcaataagatcgttttctggctgcaccacgtcaccgttaccggtgatgataaggcttgcagtttcatccgcgactgccagcagtgcttcaagtttgcgcagcatgcgatcggtacgccagtcttttgccagctcaacggcggctttgaccagatggccctgatgcatttccagtttacgttcaaacagttcgaacagcgtaaaagcatccgcagtaccgcccgcaaagcccgcgatgactttgtcgttgtacagacggcggacctttttcacgttgcctttcattacggtattgcccaacgtggcctgaccatcaccagcgatgaccacatggccgttacggcgtacgcttactatagttgtcacgagctgaccccttggttacgaatacagagtacaaaccccgtacaaaagtacggggcataatgcaattatagatgggggggattttgagggtttcaacccccggcggcgagccgaatgcagtttgtatgacccgccatcttcaaccgattgagggtgctgtctgcgttctctttgcctttcaccgggccaatgaccacacgattccagccattgttggtggtgattttgctgtcaaagccttcgaacgccagctgagcacgtaccgtctctgcctgttccgcgcctctgaagctaccgcactgcaccatccagcggcgttcgtcttttttctccgccgtcggttttggcgcgtcagcggcacgagcaactggcgcagcttgctgcggcttgctctgcgcagtcgtgtgcgcaggagtttgcagcagatcctggtacggctgctgagaagaagccggtttagactggcgcggttgcgcctgtaccggtgcggcttggctcgtacgcgtctgctgctgccagctttgttcagtcgtacggctctgctgagccaggcgttgctgttccgctaattgctgcgcctgacgttggcgctgtagcgtttgctgacgctgttccggcgtctgttcattccacggaacttcaaccagctgcgttggctgctggcgcatatcagcctgcatttgttcaagaagctgacgttgttctggtgtcagttgctccggcgttttcacttcaccaccggcagaaggttctgtgggcgcacgcactcccggctggcgactttccagctctttaatgtagcgccagcgttcttctggttttggtggtagtccgtttccggtcactttctggctttgcagcgtctcggactcttctttcttgtgatgcgtaatgaagtacagaccaccgataaaggtcacaagaacggcggcagcaatagcgaccatagcgggagaaaccgcaggcagatttcgttgctttttccgactggtgctcttttttcgccggctaggtgccggttggctgcggcgtacataatctcgttgtgccactatcgtttcgctgtatttattcgttcgtcagcccgccatgttacttaagcggcgggcctttgaccagtcacggcagtcttaaaggtttactttaaggtaacgcgcgtgtacttccccggatgataagttcgcagtccattaaacgagagccactgccaacgtgttgcccctgcatttgatcaagcaataacagcatagcttcccgaccgatttcgtaacgcggctgcgcgatggttgtcagcggcggatcacaaaattgcgtcaggtcgatgttatcaaaaccgattatggaaaggtcttccgggactttcagcccctggcgttttgcctgagaaagtgcgccgagcgccatcacatcgctatggcagaagacagcagtaggcggttgtggaagatcaagcagctgctgcatcgctttgcttccggcttcgaaggtgaagtcgccacgggcgatgtattgcggatcaaccataatgccgcagcgacgcagcgcctgaacatagccttgcaggcggtagtgacacagcggcatctcttcgggaccggctatacagccaatccgtttatgcccttgctcatataaataatttactgcatcaaatgcggcggtcagattgtcgatatgaactgtaggcagctccagctccggtgcaaattcgttcgccatcaccatcggcggcagattacgctgttcctcaatgctggcatcaaacggcagcctactacccagcaacaacatgccatcaatttgcttggtgatgatcaaatcgataaaggttttttcctgctgattttgatgcgcacagtcgccaatcagcaccagatatccgtgatttgccgccgtaacttcgataccgcgaataatttcgctaaagaagggatcgcagatatccgggacaatcaccagaatggtgcgggattcattacgcttgacgttgcgccccataggctgcggtaaataacccacttcccgggccgctttttcaacccgattacgggtggcctgggagactttatcgggattcattaatgctcgggagacggtcgctgtagagacttttgccttgagggcaacgtctttcatggtcgcggcagtttcctgcttcttcgctttcacactcactcctcgcctggcacgtcaggcgtactacatccatgtttacttcacatcggcaacatttttagcagatagcgcgtgaaaacggttacagaattttcatgaaaagtgtgatgaatattgaatttttcgatccgcctcgcatcgtgagcggtttaaccctcaatcggatcaacatccagcacccatttcaccttacgggaatccggtattgtattgatgagcgccagcgtaccgttaatgatgtgttgcaagcgcacgcgggaagggtgctgcaacaatatctgccagcgccagcgaccgccacgtttaggtgccagagccggaaccggaccgagaacccacagtttctcgtctgccagtgggctggagaggatcagattacgcagttgttgcaggaacaatggcgcgtgctgattgttatgatcttccgcacgcacaatcacatggctggtccacggcggtagctgcatcattcgccgctcagccagcgcctgttcggcaaaggcgtcgtagcctttatagagcaacgtttgcaacagaggatgttccggatggtgcgtttgcagcaccacttcgccctgtttacccgcacgcccggcacgaccggcgacctgggtgtaaagctgagcgaaacgctctgcgctgcgaaaatcggcagaaaacagcgcgccgtccacgtccagtaatgcaaccagcgtcacatccgggaaatggtgacctttcgccagcatttgtgtaccaatcaaaatccgcgcgccgccgcgatgtacttctgccagttgctgttccagcgcccctttgcggctggtggtatcgcggtcgatacgagaaatgggcacgccggggaacaacggcgcgagcgtctgttcaagctgttcggtgcccagccccacggggaccaggtgcgtggaaccgcaggaagggcactggcgcggcaccggacgctgactgtcacagtggtggcagcgcagatggtgctgcgcctgatgcagcgtgtagtagtgatcgcaacgtgggcattcggcaatccagccacagtcgtggcacagcagtgcaggcgcaaagccacggcggttaagaaagagaatgacctggttatcagcctgtaaatgctggcgcatacgagtgattaacgccggagccagacctgcctgcaccttctgaccttttaaatccagcacatgttgaattgccggacgcgcattccctgcccgacgggtcaggcgcagcaggcggtattttttctgctggacgttgcataacgtttccagcgcgggcgttgcggagccaagaataatcgggatttgctcgctgtgcgcacgatacaccgccaggtcgcgggcatgatagcgccagccttcctgctgcttgtaggagctgtcgtgctcttcatcaatgacaatcacgccgagatttttaaacggcgtaaacagcgcggagcgggtgccgatcacaatcgccgcctcaccatttttcgctttcagccacgcgctaagacgctcgctgtcgttcaggccggaatgcagaacttccacgggggcattaaaacgttcacgaaaacgggcgatagtttgcggtgtcaggccgatttccggcaccatcaccagcgcctgtttgccctgagcgagcacgttttccagtacgctgagataaacctccgttttaccggaaccggtaacgcccgccagcagccaggcagaaaaagtatctgccgcgctatgaattgcgccaacggcggtggcctgttcggtattcaatcgcaaccgctcaccagaaacggcatagttcgttcgccagtcgctaaactctggtgtttcacttgctaaatcacacagaccttttttgcgtagcgcctgcaacgcggcatcattaaattcgagcgtggcgacctggtcgcgccagattttgccttgccgtaacgccgccagcgcctgttgttgcttgggggagcgtttcaggctgttcagatccaccgcctggccttgttcagtggcaaaccagtaccacatcggcgcgttcgccgcaggccgcccctggcgtagtaaaatcggcaaggcatgaaacagcacatcgccaatcggatgatgatagtaatctgccgcccatagcagcaatcgccagacggagtgagtaaacaccggctcactatccagcacttcgactaccgcttttagctcattgagcggcagttcgctggcatcgctaacacttaccacaatcccgatgcgctcctgctgtttgccaaacggcacgcgcacgcgacacccagctttaaccgtcatgccttctggcagcagatagtcaaaggtacgaggaagcggaacgggcaaggcaacgtgggcaacgggcatagcatcatcctgacttgaaattcggtgggttagtatacacattgccgtagaagagtgcggatcagtttgcatacgctggttaatttctgtatgatttcgcgccttcgtacgaaatgatcgtattgaagctatacttttaacatcgcgtggtgtctggcgttagggctggaagagcgacgcggccttaaaccgaggttttcccatgaaaaaagatattcacccgaaatacgaagaaattactgctagctgctcttgcggtaacgtaatgaaaatccgctccaccgttggtcatgacctgaacctcgacgtgtgcagcaagtgccacccgttcttcactggcaaacagcgtgatgttgctaccggtggccgtgttgaccgcttcaacaagcgtttcaacatcccgggcagcaaataagaccggatttccgaaaaaagcgccgcacggcgctttttttgtgcctgaattttggtcgtattaccagctaaacagcggccattctttggcgaccgtggtgagttgtggcgcatcgaaaacggcttgtgggctgaccaccgtttcctcaagcggaatattcttgccgtaacgttctttgagctttgcctgaacttgtgggctgctcaggtcgaactctttcaacttctgctgctcgcccacgcgcattcccagcgcgttctggtaaaccttccacaccacttcgctacagtactggcgatcgtcgctccaactgaagctgaaatcatacggtttaccgagataacgttttgccgtttgcgccagtttttgctgttgttcaacactcagtccgccttcaacgcggcgaacaacgtatttgcccttttcaccatgggcgatccactgcttgagcggggtgtatttcaccgggccgactgcttcaaaaacgtagggctttttgttgcgtatcaccagcataccggtgtggctataatcggtatgggtcgccagttggatcgctttactttggctactgcgagagatctgaaagatgatgtcgccggtttgtggctgccaggcaaaggcaggtacagaaaccagcaggctgaggatcagcagcctgtttttcatagttaaacgtccatgtataaaaagcggtgggtcgcagacaacgtgctcgttgtttatgccggatgcggcgtgaacgccttatccggcctacaagttcgtgcaaattcaataaattgcaatatgacgtaggcctgataagcgtagcgcatcaggcgattccactccgcgccgctcttttttgctttagtattcccacgtctccgggttaatccccatctcacgcatgatctcttttgccgcttccgggatttcgtcgctgcgctctttacgcagatcggcatcatccggcaaaggttgcccggtaaaggcatgcagaaacgcttcgcacagcagctcgctgttggtagcgtgacgcaggttgttcacctgacgacgcgtgcgttcatcggtgaggatttttaacaccttaagaggaatggaaaccgtaatctttttgacttgttcactcttcttgccgtgctcagcgtatgggctgatatattcgccgctccattcagccatgagatacttaatcctcttcgtcaataaattgagaccagaccacacagttgatgtgggtactgaccgtaaacccgcatagtttaccgtacaggcgttaccgtgacatcgtgtaatgcacctgtcggcgtgataatgcatataattttaacggctatttgggatttgctcaatctatacgcaaagaagtttagatgtccagatgtattgacgtccattaacacaatgtttactctggtgcctgacatttcaccgacaaagcccagggaacttcatcacatgacgcgtaaacaggccaccatcgcagtgcgtagcgggttaaatgacgacgaacagtatggttgcgttgtcccaccgatccatctttccagcacctataactttaccggatttaatgaaccgcgcgcgcatgattacagccgtcgcggcaacccaacgcgcgatgtggttcagcgtgcgctggcagaactggaaggtggtgctggtgcagtacttactaataccggcatgtccgcgattcacctggtaacgaccgtctttttgaaacctggcgatctgctggttgcgccgcacgactgctacggcggtagctatcgcctgttcgacagtctggcgaaacgcggttgctatcgcgtgttgtttgttgatcaaggcgatgaacaggcattacgggcagcgctggcagaaaaacccaaactggtactggtagaaagcccaagtaatccattgttacgcgtcgtggatattgcgaaaatctgccatctggcaagggaagtcggggcggtgagcgtggtggataacaccttcttaagcccggcattacaaaatccgctggcattaggtgccgatctggtgttgcatagttgcacgaaatatctgaacggtcacagtgacgtagtggccggcgtggtgattgctaaagacccggacgttgtcactgaactggcctggtgggcaaacaatattggcgtgacgggcggcgcgtttgacagctatctgctgctacgtgggttgcgaacgctggtgccgcgtatggagctggcgcagcgcaacgcgcaggcgattgtgaaatacctgcaaacccagccgttggtgaaaaaactgtatcacccgagcttgccggaaaatcaggggcatgaaattgccgcgcgccagcaaaaaggctttggcgcaatgttgagttttgaactggatggcgatgagcagacgctgcgtcgtttcctgggcgggctgagcttgtttacgctggcggaaagtttagggggagtggaaagtttaatctctcacgccgcaaccatgacacatgcaggcatggcaccagaagcgcgtgctgccgccgggatctccgagacgctgctgcgtatctccaccggtattgaagatggcgaagatttaattgccgacctggaaaatggcttccgggctgcaaacaaggggtaaaaatgagtgtgattgcgcaggcaggggcgaaaggtcgtcagctgcataaatttggtggcagtagtctggctgatgtgaagtgttatttgcgtgtcgcgggcattatggcggagtactctcagcctgacgatatgatggtggtttccgccgccggtagcaccactaaccagttgattaactggttgaaactaagccagaccgatcgtctctctgcgcatcaggttcaacaaacgctgcgtcgctatcagtgcgatctgattagcggtctgctacccgctgaagaagccgatagcctcattagcgcttttgtcagcgaccttgagcgcctggcggcgctgctcgacagcggtattaacgacgcagtgtatgcggaagtggtgggccacggggaagtatggagcgcacgtctgatgtctgcggtacttaatcaacaagggctgccagcggcctggcttgatgcccgcgagtttttacgcgctgaacgcgccgcacaaccgcaggttgatgaagggctttcttacccgttgctgcaacagctgctggtgcaacatccgggcaaacgtctggtggtgaccggatttatcagccgcaacaacgccggtgaaacggtgctgctggggcgtaacggttccgactattccgcgacacaaatcggtgcgctggcgggtgtttctcgcgtaaccatctggagcgacgtcgccggggtatacagtgccgacccgcgtaaagtgaaagatgcctgcctgctgccgttgctgcgtctggatgaggccagcgaactggcgcgcctggcggctcccgttcttcacgcccgtactttacagccggtttctggcagcgaaatcgacctgcaactgcgctgtagctacacgccggatcaaggttccacgcgcattgaacgcgtgctggcctccggtactggtgcgcgtattgtcaccagccacgatgatgtctgtttgattgagtttcaggtgcccgccagtcaggatttcaaactggcgcataaagagatcgaccaaatcctgaaacgcgcgcaggtacgcccgctggcggttggcgtacataacgatcgccagttgctgcaattttgctacaccagtgaagtggccgacagtgcgctgaaaatcctcgacgaagcgggattacctggcgaactgcgcctgcgtcaggggctggcgctggtggcgatggtcggtgcaggcgtcacccgtaacccgctgcattgccaccgcttctggcagcaactgaaaggccagccggtcgaatttacctggcagtccgatgacggcatcagcctggtggcagtactgcgcaccggcccgaccgaaagcctgattcaggggctgcatcagtccgtcttccgcgcagaaaaacgcatcggcctggtattgttcggtaagggcaatatcggttcccgttggctggaactgttcgcccgtgagcagagcacgcttagcgcacgtaccggctttgagtttgtgctggcaggtgtggtggacagccgccgcagcctgttgagctatgacgggctggacgccagccgcgcgttagccttcttcaacgatgaagcggttgagcaggatgaagagagcttgttcctgtggatgcgcgcccatccgtatgatgatttagtggtgctggacgttaccgccagccagcagcttgctgatcagtatcttgatttcgccagccacggtttccacgttatcagcgccaacaaactggcgggagccagcgacagcaataaatatcgccagatccacgacgccttcgaaaaaaccgggcgtcactggctgtacaatgccaccgtcggtgcgggcttgccgatcaaccacaccgtgcgcgatctgatcgacagcggcgatactattttgagcatcagcgggatcttctccggcacgctctcctggctgttcctgcaattcgacggtagcgtgccgtttaccgagctggtggatcaggcgtggcagcagggcttaaccgaacctgacccgcgtgacgatctctctggcaaagacgtgatgcgcaagctggtgattctggcgcgtgaagcaggttacaacatcgaaccggatcaggtacgtgtggaaagcctggtgcctgctcattgcgaaggcggcagcatcgaccatttctttgaaaatggcgatgaactgaacgagcagatggtgcaacggctggaagcggcccgcgaaatggggctggtgctgcgctacgtggcgcgtttcgatgccaacggtaaagcgcgtgtaggcgtggaagcggtgcgtgaagatcatccgttggcaagtctgctgccgtgcgataacgtctttgccatcgaaagccgctggtatcgcgataaccctctggtgatccgcggacctggcgctgggcgcgacgtcaccgccggggcgattcagagcgatatcaaccggctggcacagttgttgtaatttcagaaatttaataatgcccggtactcatgttttcgggtttatggtttctaatgaaatatattgaattatcataggattaggccggattaagcgtttacgacgaatccggcaagaagcaataagtacatggttagtttatatttgcagtccggtttgctttgcataccggattttctttttcttaccatcctgaagttttttcatcttccctgatttttcctcaccatcattggtcatttttcggttgacgcccttcggcttttccttcatctttacatctggacgtctaaacggatagatgtgcacaacacaacatataactacaagcgattgatgaggtaaggtatgagcttttttcacgccagccagcgggatgccctgaatcagagcctggcagaagtccaggggcagattaacgttagcttcgagtttttcccgccgcgtaccagtgaaatggagcagaccctgtggaactccatcgatcgccttagcagcctgaaaccgaagtttgtaagcgtgacctatggcgcgaactccggcgagcgcgaccgtacgcacagcattattaaaggcattaaagatcgcactggtctggaagcggcaccgcatcttacttgcattgatgcgacgcccgacgagctgcgcaccattgcacgcgactactggaataacggtattcgtcatatcgtggcgctgcgtggcgatctgccgccgggaagtggtaagccagaaatgtatgcttctgacctggtgacgctgttaaaagaagtggcagatttcgatatctccgtggcggcgtatccggaagttcacccggaagcaaaaagcgctcaggcggatttgcttaatctgaaacgcaaagtggatgccggagccaaccgcgcgattactcagttcttcttcgatgtcgaaagctacctgcgttttcgtgaccgctgtgtaagcgcgggcattgatgtggaaattattccgggaattttgccggtatctaactttaaacaggcgaagaaatttgccgatatgaccaacgtgcgtattccggcgtggatggcgcaaatgttcgacggtctggatgatgatgccgaaacccgcaaactggttggcgcgaatattgccatggatatggtgaagattttaagccgtgaaggagtgaaagatttccacttctatacgcttaaccgtgctgaaatgagttacgcgatttgccatacgctgggggttcgacctggtttataaatagtgtggcttttgtgaaaatcacacagtgatcacaaattttaaacagagcacaaaatgctgcctcgaaatgagggcgggaaaataaggttatcagccttgttttctccctcattacttgaaggatatgaagctaaaacccttttttataaagcatttgtccgaattcggacataatcaaaaaagcttaattaagatcaatttgatctacatctctttaaccaacaatatgtaagatctcaactatcgcatccgtggattaattcaattataacttctctctaacgctgtgtatcgtaacggtaacactgtagaggggagcacattgatgagcacgagtgacgatatccataacaccacagccactggcaaatgcccgttccatcagggcggtcacgaccagagtgcgggggcgggcacaaccactcgcgactggtggccaaatcaacttcgtgttgacctgttaaaccaacattctaatcgttctaacccactgggtgaggactttgactaccgcaaagaattcagcaaattagattactacggcctgaaaaaagatctgaaagccctgttgacagaatctcaaccgtggtggccagccgactggggcagttacgccggtctgtttattcgtatggcctggcacggcgcggggacttaccgtagtatcgatggacgcggtggcgcgggtcgtggtcagcaacgttttgcaccgctgaactcctggccggataacgtaagcctcgataaagcgcgtcgcctgttgtggccaatcaaacagaaatatggtcagaaaatctcctgggccgacctgtttatcctcgcgggtaacgtggcgctagaaaactccggcttccgtaccttcggttttggtgccggtcgtgaagacgtctgggaaccggatctggatgttaactggggtgatgaaaaagcctggctgactcaccgtcatccggaagcgctggcgaaagcaccgctgggtgcaaccgagatgggtctgatttacgttaacccggaaggcccggatcacagcggcgaaccgctttctgcggcagcagctatccgcgcgaccttcggcaacatgggcatgaacgacgaagaaaccgtggcgctgattgcgggtggtcatacgctgggtaaaacccacggtgccggtccgacaagtaatgtaggtcctgatccagaagctgcaccgattgaagaacaaggtttaggttgggcgagcacttacggcagcggcgttggcgcagatgccattacctctggtctggaagtagtctggacccagacgccgacccagtggagcaactatttcttcgagaacctgttcaagtatgagtgggtacagacccgcagcccggctggcgcaatccagttcgaagcggtagacgcaccggaaattatcccggatccgtttgatccgagcaagaaacgtaaaccgacaatgctggtgaccgacctgacgctgcgttttgatcctgagttcgagaagatctctcgtcgtttcctcaacgatccgcaggcgttcaacgaagcctttgcccgtgcctggttcaaactgacgcacagggatatggggccgaaatctcgctacatcgggccggaagtgccgaaagaagatctgatctggcaagatccgctgccgcagccgatctacaacccgaccgagcaggacattatcgatctgaaattcgcgattgcggattctggtctgtctgttagtgagctggtaagcgtggcctgggcatctgcttctaccttccgtggtggcgacaaacgcggtggtgccaacggtgcgcgtctggcattaatgccgcagcgcgactgggatgtgaacgccgcagccgttcgtgctctgcctgttctggagaaaatccagaaagagtctggtaaagccagcctggcggatatcatagtgctggctggtgtggttggtgttgagaaagccgcaagcgccgcaggtttgagcattcatgtaccgtttgcgccgggtcgcgttgatgcgcgtcaggatcagactgacattgagatgtttgagctgctggagccaattgctgacggtttccgtaactatcgcgctcgtctggacgtttccaccaccgagagtctgctgatcgacaaagcacagcaactgacgctgaccgcgccggaaatgactgcgctggtgggcggcatgcgtgtactgggtgccaacttcgatggcagcaaaaacggcgtcttcactgaccgcgttggcgtattgagcaatgacttcttcgtgaacttgctggatatgcgttacgagtggaaagcgaccgacgaaagcaaagagctgttcgaaggccgtgaccgtgaaaccggcgaagtgaaatttacggccagccgtgcggatctggtgtttggttctaactccgtcctgcgtgcggtggcggaagtttacgccagtagcgatgcccacgagaagtttgttaaagacttcgtggcggcatgggtgaaagtgatgaacctcgaccgtttcgacctgctgtaatctgaccccgttcagcggctgcttgctggcagtcgctgaacgttctttaccagcgtatagtgggcgaacgaaaactacacactggatctctcatgtctgccgcaggaaagagcaacccactggcaatcagtggcctggttgtgctcacacttatctggagttatagctggattttcatgaagcaagtcaccagttacatcggtgccttcgactttaccgccttacgctgcattttcggcgctctcgttttattcatcgtccttttattacgtggtcgcggaatgcgcccgacaccgtttaaatacaccttagccattgccctgttacaaacctgcgggatggttggtctggcgcagtgggcgttggtcagcggaggtgcggggaaggtggcgatcctgagctataccatgccgttctgggtggtgattttcgccgcgttgtttctcggtgaacgcctgcgacgtgggcaatatttcgcgattctgattgccgctttcggcttatttttggtgttgcagccgtggcaactcgatttctctagcatgaaaagtgccatgctggcaatcctctccggcgtcagttggggggcgagcgcgattgttgctaaacgtctgtatgcccgtcatccgcgcgtggatttattgagcttaacatcctggcagatgctgtatgcggcgctggtgatgagtgtggtcgctttactggtgccgcaacgtgaaattgactggcagcccaccgtgttctgggcgctggcctacagtgcgattctggcgacggcactggcgtggagcttatggttgtttgtattgaaaaacttgcctgccagtattgccagcttaagcacactggccgttcccgtttgcggcgtactcttttcctggtggctgctcggcgagaatccgggggccgttgaaggtagcggtattgtgctgattgtgctggcactggcgctggtgagccgtaagaaaaaagaagccgtcagtgtaaaaaggatctgaattttttcttcatgtggggcgatctcttatttaacaaaataacgataatgccccaccatccgccagttaaacagcacatcttcttcctgcgcgcctgcgccaatgttatgtatcaccagcggcgtaccgtcgcgggcgaagccatcactaaccaccccaatatgtgccagcccgttatccagtcgccaggagacaatatcgcccgcttgatagtcactggggttcttgctggtggggcgtgttttatcatggcggctaaaccaggtttccagattaggcacccgacggtgatcgatgttgctgtccgggcgctttaacttccatttttgcgggtactcagcaaaattcttcgccatatcttcgtgaaccagtttctgcaaatcgaccttctggctgcgcaatgcgcggatcaccacatcggaacatacaccgcgttcttgcggaacatcaccgccaggataagtaagctgcacatacgccggatcgtaaaatagcgtgctgccaatttgctgtctggcaccgtctgcgatggcaaggttggtattggcctggatttgtaccacggttggtggaacggcgggagattttaaggagtggctggtaaatgccgttagcaggctgagcagcgccagactagctttcatctggttcgtccgtgaaaataagagtcacagattcgaccttccgggctaacgattgttctgtagagaaaatgtccagaagcggataaaaaattcctgaacaacgtgggagtttcagattactggcacagagtgccggatgcggagtgaacgccttatccggcctacaaaagcacgcaaattcaatatattgcagagattgcgtaggcctgataagcgtagcgcatcaggcaattttgcgttcaaactcccggacaagccgggagtttggagtaggttattcccactcttgcaggaaacgctgaccgtactggtcggctaccagcagagcggcgtaaacctgatctggcgtcgcgccgccaggcatgttgtgaatggtttcaccttctgcacatgccgcttctgccacaattcgcattttcgccgggacatcttctttaatatccagttgagcgagagttattggcaaacctaccgcatggctaagggcagctacggtttcgatttcctccaccggcgcattttccagaaccagctgcgtcagcgtaccgaatgccactttttcaccgtgataatagtgatgcgcgtccgggatagcggtcaggccgttatgcactgcgtgcgccgcagccagaccaccactttcaaaaccaacaccgctcaaataggtgttcgcttcaatcacgcgctccagcgccggagtcactacatgctgttcggcagcaagcatcgctttttcgccttcttccagcagggtgttgtagcacagttcagccagtgccagcgcagcctgggtgcacttgccgcccgccatggtggtcgcgccgctacgagagcaggcacgcgcttcaaaccaggttgccagcgcatcgccgatacccgccgctaacagacgtgcaggtgcgccagcgacgattttggtgtcgacaatgaccatattcgggttatttggcaacagcagatagcggtcaaactcaccctcatcggtgtagataacagacaatgcgctgcacggtgcatcggtagaggcgatagtcggtgcgatcgctaccggaacacccatgaaatgtgccagtgctttggcagtatcgagggtttttccgccaccgataccgagaattgcgccacactgcgcagtctccgcgatgccacgcagacggtcgatctcattttggctacattcaccgccaaacggcgcaatttctactaccagtccagcatctttaaagcttttctcgacagtggattgagcaaaacctaaaacaaatttgtcacccaccactaaccagcgttctgccagcggcttcaggtattcgcccagacgattaatcacatcagcgccctggatgtatttacccggactttgaataatgcggtccataattgctcctttagagatgagtagtgccaaatgcggcattccagtcgtgttcgaacttctctatagcactctctaccgcaggggtgttgagcatttgttgcgctacatctaagggcagggtgatggattcacatcctgccagtaaacagtccagcgcctgacgcggcgttttaaagctggctgccagcaccatgctttctggcgcgtgcatttctaacagcgtttgcagctcctgaaccgtacgaatgccgtctccgccctgggcatctacgcggttaacatacggagcaacgtattttgcccctgccagtgcggctaataacccttgtgcggcgctatatacagcagtgccaagtgtagtaataccctcttttttcagtattttaattgctgccagaccttcggaagtcaccgggattttcaccacaatacccggaatagcgtcgcgcaggcgcttcgcttcttccaccatcccctgcgcgtcgcggctcatggtctgagcaaacagaatgccctcatcaccaatcgctttttgcagacgcggcagcacttcccatatggactccttgctggcagcgataatgctcgggttagttgtcaccccggcaatggggaatatgcgtgccagacgttcgacttctgcgacgttagcggtgtccagatacagttccatgatgtttccttttacagttccagttcatgttgcagcaggctggcgatagcgtcggcagaggcggcgttaaccagcgcgttacggaattcttcgtgcatgatgcggcgagcgaggcggctgaaaatgcgcatatgctgatcgcccgcagcgtgtttgttcagggttaacataatgatgaattgcgcttcatcatcgccccagcgcaccggcgcttgcagacgcgccacgctgatggtggattgctcaatgtgttcacttttgctgtgtggaatggcaaaactaaagcccagaccggtagagaaaacggcctcgcgcgcccacaagtcggcttccagtttacgcggatagcggcagcggcccgccagcagcaggttatcggtcatgcctttgagcacttcttctttgctgcgccagtcgctttccagtgtgatgcactcggcggtgaccagcggtgcgtcttgttgggtcatgcggaattgcgccagcaggtgttctacttccaggctagtacggcaggccattgcctggttgagcaacttgcggcactcacggctatcaagttgcgccatccgagctttcgccgccggaatacttggtgcgctcatgctgagttcatccagccctaagccgaccagcaacggcagcacggaacctttcgctcccagctcaccgcacagaccaatccatttgccctggcgatgcaccgcttgcacggcgtaatcgagcgcccgcaagaatgccggattcaggctgttgtagtgacgagtaaccttagcgttatcgcgatccaccgccagcagatactgcgtcaggtcattactaccaatactaaagaaatcaatctcttcgcagcattgatcgatgatgaacatcacgctcggcacttccagcatgatgccgagctggattttctcatcaaacggaatgtgttcgttacgtagttgctgtttggcttccgccagtttttctttcacccataagatctcttccatactggagatcatcgggatcatgattttcaggctgccgtgagcggaggcgcggaggatgctccgtagctgcgtggtaaacaagctcgcgtactcttcataaatacgcacggcgcgataaccgaggaacgggtttgcctctgcgggaatgttcagataatcaacgggtttgtcgccgccaatgtccatagtgcgcacaataatgctgcgtccgttggcggattccagcgcctgacaaaaaatgttgtacaactcgctttcgcccggtgcgctggtgcgatccatatagagcatttcagtgcggaacaaaccaacgccttccgcaccattgccgaatgcggcctgcgcttccacggagtgagcgatgttagcggcaatttcaatgcggataccgtcagcggtacgggcttgttgggtcagccagacacgctgttgctcacgcagggcgtcctgtacgcgggcttcttgctgataataacgagctacggcttcccctggctcaaccacaatcgccccggcgttgccgtcgatataaatcgtttgttgctgccacggagtaagggcatcaatatccacaccaaccagcgttggaatgttgaagctacgggcaaggatcaccgtatgactggtggtgccgccgcttttgagcaacaatcctttgaggtgatttttatccagttcgaggaactggctgggggtcagttcatcagccatacaaatggcgggctgcgtcagtttgcccggtgccgggaagcgttgctcaccgtagatttgctggagtaactggaagcagacgtcgcgtacgtccagggcacgttcttgcaggtagctgctgctggaacgggaaaactcttcgcaaaagtgattcgcgctggcaacaattgcttcggcgcagcttaatccggcgctgacgcctgccagtaaatgttcgcgcagggaagtatcgccagccagggatcggtgagcttccagaatcgcgctggtagcaccgtcgctatccagcagacgaaactcaatgtttttcagtaccagcgtcaggccgttttccagtgcggattgctcggcgtcaacgcctttggctgcgggaagattacccagcgcattgagatctaaagaagagatcggcgtcagaatgccgcctgcactaccgctgcacacggtgcgggcgcggataatttgcggattcagattggtcagactaaccggcagtggttccagttcgtcagatttaacttccgccagcggcgcatcgcagtgggggaattcatcgcgcagccattggcttaaacgctggtgcgcttcctgttcgtcggccccggaaatcagtaactggcagttatcgcccgccagcgtatcggtgccaatcagcgcaagggcgcttttggcgttgcccttgcggtcagtgcgcaggttatgccactcaatttgactactaaaagtattacacagcgtttcaacgtggcttgccggacgcgcatgtacgccgttaggtagctcacaaataaattccacaatcagggccattgcctctctcccggtacggttttctgtttacaggataagagcgcacggcaacggcctgccatgtgacaaatctgccaaaagctggacaaatgtaatgtaaccgtcaatttgcgacgcgtctcacaagacgctgttttgcggcatgcttccggtttatcgcaagttatgaggcggatcgcatttttgtactgatattacaaaagtccagtaaatggcctttttatccactgtttgctccgcctgcgattgcctattgtttcctccatcaaaaatatggacatgggctttcgcaagcccgggagcagcttatgaatgagttggtgcagatcctgaaaaatacccgtcagcatttaatgacgggcgttagtcacatgattcccttcgtggtaagcggcggtattttgctggcggtttccgtcatgttgtatggcaaaggcgcagtgccggatgccgtagccgatccaaatctgaaaaaactgtttgatatcggcgttgcgggcttgacgctgatggtgcctttcctcgcagcgtacatcggttattccattgcagagcgttctgcgctggctccgtgcgctatcggtgcctgggttggtaacagctttggtgcgggcttctttggtgcactgatcgccgggattatcggcggcatcgtggtgcattacctgaagaaaattccggtgcataaagttctgcgcagcgtgatgcctatcttcattattcctatcgtcggcacactgattaccgcaggcatcatgatgtggggcttgggcgagcctgtaggggcgttgaccaacagcctgactcagtggcttcaggggatgcagcagggcagcattgttatgctggcggtgatcatgggtctgatgctggcgttcgatatgggcggtccggttaacaaagtggcctatgccttcatgctgatttgcgttgctcagggtgtttataccgtggtggccatcgctgccgtgggtatttgtatcccgccgctggggatggggctggcgacgctgattggtcgtaaaaatttctccgcagaagagcgcgaaaccggcaaagcggcactggtgatgggctgtgttggcgttactgaaggggcgattcctttcgccgctgccgatccgctgcgtgtcattccttccatcatggtcggtagtgtttgtggtgcagtaactgcggcgctggtcggtgcgcagtgctatgcaggctggggtggtctgattgtgctgccggtggttgaaggcaagctgggttatatcgcagcagtggctgtcggagcagtggtgacggctgtttgtgtgaacgtgctgaaaagtctggcgcgtaaaaatgggtctagcactgatgaaaaagaagacgacctggatttggattttgaaattaattaattgaggaacgagccatgacgaaaattattgcagtaaccgcatgtcctagtggtgttgcccatacctatatggcagcagaggcgctggaaagtgccgcgaaagcgaaaggctgggaagtgaaagtagaaacccaggggagtattggtctggaaaatgaactgactgcggaagatgtggcgagcgctgatatggtgattctgaccaaagatatcggcatcaagtttgaagagcgttttgctggcaagaccatcgtgcgcgtcaacatcagcgatgcagtaaaacgtgctgacgccattatgagcaaaattgaagctcacctggcgcaaaccgcttaagttcttctcccgctcgcaagggcgggttcgctttcccacaggagttcctcatgacgaatcgtatctctcgcctcaaaactgcactgtttgccaatacccgtgaaatcagcctggagcgggcgctgctttataccgccagccatcggcaaaccgaaggcgaaccggtgatattgcgccgggcgaaagcaacagcgtatatccttgaacatgttgaaattagcattcgtgatgaagaactgattgccggtaaccgcaccgtaaaaccgcgcgccgggattatgagcccggaaatggacccttactggctgctgaaagagctggatcaattcccgacgcgtccgcaggaccgctttgctatcagcgaagaagataaacgtatctaccgtgaagagttgttcccgtactgggaaaaacgtagcatgaaagatttcatcaacgggcagatgacagatgaagtaaaagccgcgaccaacacgcagattttcagcatcaaccagacggataaaggccaggggcacattattattgattacccacgcctgttgaatcacgggctgggtgagctggtggcacagatgcagcaacattgtcagcaacagccggagaatcacttttatcaggccgcgttgttactgctggaagccagccagaaacacattttgcgttacgccgaactggcggaaacgatggcggcaaactgcacagatgcccagcgtcgcgaagagctgctgactattgcagagatctcccgccataacgcgcaacataagccgcagacgttctggcaggcgtgccagttattctggtacatgaacatcattctgcaatacgaatccaacgccagtagcctaagcttggggcgcttcgaccagtatatgttgccgttctatcagacaagtttaacccagggcgaagatgcggcgttcctgaaagaactgctcgaatctttatgggtgaaatgcaacgacatcgtgctgttgcgctccaccagtagcgcgcgttatttcgccggtttcccgaccggctataccgcactgctcggcgggttaaccgagaacggacgtagcgcggtgaacgtgcttagcttcctttgccttgacgcctatcaaagcgtgcaattaccgcaaccgaacctcggcgtgcgcactaacgccttgatcgacacgccgttcctgatgaaaaccgccgaaaccattcgcttcggtaccggtattccgcaaatctttaacgatgaagtggtggtgccagcgttcctcaaccgtggcgttagcctggaagatgcgcgcgactattccgtagtgggctgtgtggaattatctattcccggcagaacctacggcttgcatgacatcgcgatgtttaatctgctgaaagtgatggaaatctgcctgcatgaaaatgaaggcaatgctgcgctgacttatgaaggtttactggagcagatccgcgccaagatcagccactacatcaccctgatggttgagggcagcaatatttgtgatatcggccatcgcgactgggcacctgtaccgctgctcagtagctttatcagcgattgtctggaaaaaggccgcgatattaccgatggcggcgcgcgttataacttctccggcgtacaggggatcggtatcgccaacctgagcgattctctccatgcgttgaaagggatggtttttgagcaacagcgtttaagttttgacgaattgctgagcgtattaaaagccaacttcgcaacgccagaaggcgaaaaagtccgcgctcgcttaattaaccgcttcgagaaatacggtaacgatatcgacgaggtggataacatcagcgccgaactgttgcgccactactgcaaagaagtggaaaaataccagaacccgcgcggcggctacttcacgccgggaagctataccgtttctgctcacgtcccgttgggaagcgtggttggcgcgacgccagacggtcgttttgccggagaacagctggcagacggcggcttgagtcccatgctgggccaggacgcacaagggccaacagcggtactgaagagtgtcagtaagctcgataacacgctgctgtctaacggtacgttgctgaacgtgaaattcactccggcgaccctggaaggtgaagcaggattacgcaaactggccgacttcttacgggcgtttacccagcttaagttacaacatattcagtttaacgtggtgaacgccgacacgttgcgggaagcgcaacagcgcccacaagattatgccgggctggtggtgcgcgttgccggatacagcgccttctttgtcgaactgagcaaggagatccaggatgacatcatccgccggacagcgcatcagctgtaattaaactgtcgaaggagatccaggatgacaagttccgccggacagcgcatcagctgtaacgttgtggaaacgcgccgcgatgatgtggcgcgcattttcaacattcagcgttatagtctgaatgacggcgagggcattcgtacggtggtcttttttaaaggctgtccgcatctttgcccgtggtgtgctaatccggagagcatctccggcaaaatccagacggtacgcagagaggcgaaatgtctgcactgtgcgaaatgtttgcgtgatgcggatgaatgcccctccggggcgtttgaacggattggtcgcgatatcagccttgacgctctggaacgggaagtgatgaaagatgacattttctttcgcacgtccggcggcggcgtcacgctttctggcggcgaagtgttaatgcaggcggagtttgctacccgttttttacagcgactgcggctgtggggtgtgagttgcgccattgaaactgccggagacgcaccagccagcaagctattaccgctggcgaaattgtgcgatgaagtgttgttcgatttaaaaattatggacgcgactcaggcgcgggatgtggtgaagatgaacctgccacgcgtgctggagaatctgcgtttgctggtgagtgagggcgtcaacgtgatcccgcgtttaccgctgatccctggtttcacgctcagccgggagaatatgcagcaggcgctggatgtactgatcccgctgaatatcaggcagatccatctgttaccgtttcatcagtacggcgaaccgaaataccgcctgctggggaaaacatggagcatgaaagaggtgcctgcgccgagcagtgctgatgtggcaacgatgcgcgaaatggcagaacgggccggacttcaggttaccgtgggaggttaaaatggcatacctggtggcagtaaccgcctgcgtaagcggcgtggcgcatacttatatggcggcggaacggctggaaaagttgtgcctgttagagaagtggggagtcagcattgaaactcagggcgcgctgggaacggagaatcgtttagcggatgaggatatccgccgggcggatgttgctctgttgattacggatatcgagcttgccggtgccgagcgatttgaacattgccgctatgtgcaatgcagcatctacgcattcctgcgtgagccgcagcgggtaatgagcgcggtgcgcaaagtgctttctgcgccgcagcaaacccatcttattctggagtaattattctggagtagtcggtttttctgtcagttggctgtggtactgccggcgatattcgctcgggctgcgttcggtgtttttacgaaacagacggcagaagtagttgctgtcgacaaagccgcaggcgtgcgccacttcttttaccttcaggtcatagcctttcaataacgtcttagcgtgctccagtcgcgtgtgattcaggtattcgttaaaaccaatggcccccgttttttgaaacaggtggctgaggtaatttgggctaatataaaacgcctgtgcaacagattcgcgggtaagcgcggaggcatagcgttcgtcgatataatcgcgaatagcttcaaatagtgcctggctgcgactggcggtctggatttggctgccaagcaaatcgcggcagtggctaagcaggctggcgacgataagccttgccgtttgctgctcctgcggctgcatttgcatttcattgagcgtttgtagcagaaaagaacctatgcgtgggccgcgtcgggcgacgtgttgcttcgccagattttgatattgtttgccatcccattgcacgacgctgaagccgagttgctgtttgccaaacagcacgctaaaggtagtagcgggggcttgccattgtggaaaattccagccaccagcaggaacgtacagcacatcgccgggaactaacgttgctccagcgccggtatcaacaaactcaccttccagcacaatttccagccgtggaaaatcgacctgatacgcaagatcgggcaccgggccgttactgctggcaaagtaaatctggcgcagggacagcgggccgttgatcaggcgggagagcagatagctgacgtcgtgatacatgttattcccttaggtatgtagacgggaaaacagtaactggcattattaaaaaaggccacctgaaaagtgtggcctgaggggagttcgatgtaaacattgcggcagttgtattgccggatgtggcgtaaacgccttatccagcctaccgccgcgatctgtaggccggataagacgcgtcaagcgtcgcatccggcaaatagcgcctggctgataattactgattacccacctgatcgccatagggcagtgtgtcgtaatcgatcagtgcgtttttcttatacgggttaccaatccagcgggtagtttctttgaactgcggattcaccacactacgggttggatcgtaaccgtcgtaagataagcccgccaaatcactccaggtgtggatcagttccgccaggctgtatttacgatcaacatcctggctgaaatcacggggatgagtcgcttgccatttttcactcgtccacagcaggaacggaatggtgtacatatgacgcgtcgggttgtcctcattacgcccctgagttttgtgcggcggcgtgtcgtaaacctcttcaccgtggtcagagaaataaaccaggaaaccgttcgggtttgctgctttaaagtctttaatcaggctggcaaccacatgatcgttatacaggttagcgttgtcataatcgttataactctccagctcttccgcgtttaatcccggcggaacatgatcggtattgccatcaaacttgccctgattttccgggtagcggtatttgtatttgatatgcgtacccagcagatgaacaatgatcagtttcttcggcgcagggtcattcagcacttcctggaacggcttcagcacgttggtgtcgtattcacgcgcactctgcgtacgttgctggttcatgtagtactgcttgtcggtctggcggctaaataccgtcagcatggtattgcgggcggtcatcgtctgctggttggtgatccagaaggttttataacccgcctgtttcatcatgttcatcaggctcggctgcgtcagatacagatccgggttcttttcattggcaaaggtcagcgcctgttgcaggatttcaatggtgtacggacgagacgtaactacgttattaaacacggtcagattcggatcggttttatgcagcgcatccagctccggcgtggtttcacgcggataaccgtacagactcatgcgtccgcgctgggtgctctcgccaatcaccagcactaaagtgcgcggttcgttaccgctttcatctttgaaattagccagtggcggcaaggcattattttcattcagtaactttgttaggctgtttagttgctgacgatactgataatagccggtcaggaattgccacggtgcggcaggctccatacggctggccaggttatccaacgttttctcaaacggcttgtttttgataaacgtattcatggcgatcggatgcagaatcaagccataaagcagggcaaaagagacaacataacgccacggctttggaatatagaccgggcgcaggcgtgtccacagcagaactgccaccgccgtataggccagcgcgataagcacaattttcaggctgaaatactggcttaaatactcgctggcttcgttggtgttggtttcgaacatcacaaacagaacgctctggctgaactcctgaccgtagatgacgtagtagcacagcgccgccagagaggccgcccatagcaccacgccgattactgcggcaataattttaatccgcttcggaaagaggaataccgggatcaaccacaggctactgaataacaggctgtcgcgaatgccgttagtgccactataaccactgatgtaaataatggcctgtagcagagtagagaaaaaccaaaagtagagcagtgcccaacccagggctttccagctaaaaagaggtttagcctggacttctgtggaatgcatagtaagaacctgtcttgaaaaaatatcgccgaatgtaacgacaattccttaaggatatctgaaggtatattcagaatttgaataaaatgcagacagaaatatattgaaaacgagggtgttagaacagaagtatttcagaaaaccctcgcgcaaaagcacgagggtttgcagaagaggaagattagccggtattacgcatacctgccgcaatcccggcaatagtgaccattaacgcttgttcgacgcgaggatccggttcctggccttctttttctgcctggcgggagcggtgcagcaactcggcctgcaatacgttcagcgggtcggtgtaaatattccgtagctgaatagactctgcaatccacggcagatcggccatcagatgggaatcgttggcaatcgccagcaccactttgatgtcttcttcttgcaggttgcgtaactctttacctaacggccacagtgctttgtctaccaggcgttggtcatagtattccgccagccacaggtctgctttggcgaagaccatctccagcatgccgagacgcgtgctgaagaatggccaatcgcggcacatagcctccagctcgctctgtttgccgtcttcgaccactttttgcagcgccgtacctgcacccagccaggcggggagcatcagacggttttgcgtccaggcgaagatccacggaatggcgcgtagactctcgacgccgccggttgggcgacgtttcgccggacgactacccaacggcagtttgcccagttcttgttccggcgtagcggagcggaagtaaggcacaaaatctttgttttcacgtacgtagccgcggtagacatcgcaggagatgacactcagttcatccataatgcgacgccagctctctttcggctccggcggtggcagcaggttggcttccagaatcgccccggtataaaggctcaggctgctgacggtgatttctggcagaccatatttaaagcggatcatctcgccctgttcggttacgcgcaggccgcctttcaggcttcctggcggttgactcagcagcgccgcatgagcaggtgcgccgccgcgaccaatggaaccgccgcgaccgtggaacaacgtcagctcaatacccgctttttcgcaggttttgattaatgcatcctgtgcctgatattgcgcccaggaagctgccatcactcccgcatcttttgcactgtcggaatagccaatcatcaccatctgtttgccctgaatcaggccacgataccagtcaatattgagcagctgggtcatgacatcgttggcgttgttcagatcatcgagggtttcaaacagcggagcaaccggcatcgcaaacccgatacccgcttctttcagcagcaggtggacagccagtacgtcggacggcgttttcgccatgctgatcacgtaggcggcaatggagccttgcggtgcttcggcaatcacctggcaggtatcgagcacttcgcgcgtttcggcgcttggttgccagttgcgcggcagaagcggacgtttggagttcagttcgcggatcaggaacgcctgtttgtcggcctcactccagctttcgtagtcgccgataccgaggtagcgggtcagctcgcccagcgcttcggtatgacgcgtgctctcctgacggatatcaatacggaccagcggtacgccgaaacatttcacgcggcgcagggtgtcgagcagatcgccgttggcgataatacccatgccacacgcctgaagactctggtagcaagcgtagagcggttcccacagttcttcgttttgtgtcagcaggccttctggttttggcagttcttcgcctttcaggcgcgcttccagccatgcctgtgtcgccatcaggcgagaacgcaggtttttcatcagatagcgatacggttctgcggcaccttcttcgccaaccagcgccagcagttcaggggtcgcttcaaccatgctcagttcagaaaccagcacctgaatatctttcaggaacaaatcggtggctttccagcggctgagtagcaggacgtggcgggtgatatcggcagtgacgttcgggttgccgtcgcggtcgccgcccatccagctagtaaaacggaccggaacaaattcgacgggcagtttgtagccgaggttctcttccagttgttcgttcagttcgcgcaggtaatttggtacgccttgccacaggctgttttccactacggcaaagccccatttggcttcatctaccgggcttggacgcagcttacggatttcatcggtatgccaactctgggcgatcaactggcgcaggcgacgcatcagctggttgtgttcgtagtcagcgatatctttgttatcgagctgttttaaacaggcgttcacttccaccattttgtggatcagtgtacgacgggtaatttcggttgggtgagccgtgaggaccagttccaggctcaggctttccactgcttttttgatggtgtcttcgctcagttccggctggtttttcagtttacgcagggtgcgggcgatcacttccgggttgctggcagcttcgcctttcgggctaatgctgtggtattgctcggcggtgttggccaggttcaggaactgactaaacgcacgcgcaacgggcagcagctcgtcgttgctcaaattttgtaaggtggtgagcaactcctggcggttagcatcattgccagcgcgactagatttgctcaacttacggatagtttctacgcgttcaagaatgtgttctcccaacgcatccttgatggtttctcccagcactttgccgagcatactgacattactacgcaatgcggaatattgttcgttcatattaccccagacaccccatcttatcgtttgatagccctgtatccttcacgtcgcattggcgcgaatatgctcgggctttgcttttcgtcgtcttttataaagccacgtaaaagcggtgacgtcaaatgctgcgaaatcgcttcagcaaacgaataaatagcaggaatttacgtcattaaattcacgacgctttaaataagcgtaacttatggaaatgttaaaaaatcgccccaagtaacaccaaaggtgtaggtcggataagatgcgcaagtatcgcatccgacattattgcggcactggagtttggcaacagtgccggatgcggcgcgagcgccttatccggcctacagttgggcatcgtttgagtcactgtcggtcggataagatgcgcaagtatcgcatccgacattattgcggcactggagtttggcaacagtgccggatgcggcgcgagcgccttatccggcctacggttgggcatcgtttgagtcactgtaggtcggataagatgcgcaagcatcgcatccgacattattgcggcactggagtttggcaacagcgccggatgcggcgcgagcgccttatccggcctacgttttaatgccagcaaaaatggtgaattacctgggttatcagttcgcgggtgggcttgataaaccgtgtttccagatattcatcaggttgatgagcctgattaatactgccaggccccaacaccagcgtcgggcataacgtttgaataaacggcgcttcggtacagtagttcaccacttcggtttttgctccgagcaatttctcaaccacttcaaccagttgatgattcggtgggcattcatagccagggatcggcggatgcagctcgtcgaccgtcagacgacccggccagcgttcgctcaccggagccaatgcatcgttgagcaaaccattaagttcattgagtgtcatgccaggcagcggacgaatatccatatgcaactcacagcaagcgcaaatacggttagaagcgtcgccaccgtgaatatgcccgaggttgagcgtagggtatggcacggtaaacgcttcgtagtgataacgttctttcaggttatcgcgcaattgcaaaatatgcccgatggcgtcgtgcattagttcgatagcgttaactccgcgtgctggatcgctggagtgcccgctctggccctgaatacggatggcgttagagatatgacctttatgtgcgcgtaccggttgtagactcgtcggttcgccaatgatggcgcaatccgggcgcagggcggtagtttcggcaaaataacgcgctccggccatactggtttcttcatcagcagtcgccagaatgtagagcggttttttcagtttcgtgacgtcgacatcgcgtagcgcatcaaggataaacgcaaaaaagcctttcatgtcggcggtgcctaagccgtaaagcttgccgtcatgctccgtcagtgtaaacggatcgcgcgtccagcgaccgtcatcaaatggcaccgtatcggtatgccccgccagcaacaagccgccagccccctgtccgatacttgccagcatattgaatttgttgcgagttcctggaacaggctgcacttccacattgaagcccaaatctttaaaccagtccgccagcagagtgattaaatctgcattgctttgatcgagtgcctcttccgtggcgcttatactaggtgtggcaatcagagcgcggtaaatctcgataaatggcggtaatttgtttttcattgttgacacacctctggtcatgatagtatcaatattcatgcagtatttatgaataaaaatacactaacgttgagcgtaataaaacccaccagccgtaaggtgaatgttttacgtttaacctggcaaccagacataagaaggtgaatagccccgatgttgaatacgctgattgtgggtgccagcggctacgctggcgcagagctagtgacctatgtaaatcgccatccgcatatgaacataaccgctttgactgttagtgcgcaaagcaatgatgcgggaaagttaatctccgatttgcatccgcagctaaaaggcatcgttgatctgccgttgcagccgatgagcgatatcagcgagtttagcccaggggtggacgtagtgtttctcgccaccgcccatgaagttagccacgatttagcgccgcagtttcttgaagcgggctgcgtggtgttcgacctttccggcgcgtttcgtgttaacgacgccaccttctatgaaaaatattacggctttacccatcaatacccggaactgttggaacaggcagcctacggtctggcggagtggtgcggtaataaattaaaagaagcgaatttgattgcggtgccgggctgttatccgacggcggcacagctggcgctgaaaccgttgattgatgccgatcttcttgacctcaatcagtggccggtgatcaacgccaccagcggcgtgagcggtgcagggcgtaaagcggccattagtaacagcttttgtgaagttagcctgcaaccgtatggcgtctttactcatcgccatcaaccagagatcgccacacacctcggtgctgacgttatcttcaccccacatctgggcaatttcccgcgcggcattctcgaaaccattacctgccgcctgaaaagcggtgtgacccaggcgcaagtcgcgcaagtgttacagcaggcgtatgcccataaaccgctggtgcggctgtatgacaaaggcgttccggcgctgaaaaatgtcgttgggctgccattttgcgatatcgggtttgccgttcagggcgagcatctgattattgtggcgaccgaagacaacttactgaaaggcgcggcggcacaagcggtacagtgcgccaatattcgtttcggctatgcggaaacgcagtctcttatttaagggtgcaatgatgaatccattaattatcaaactgggcggcgtactgctggatagtgaagaggcgctggaacgtctgtttagcgcactggtgaattatcgtgagagtcatcagcgtccgctggtgattgtgcacggcggcggttgcgtggtggatgagctgatgaaagggctgaatctgccggtgaaaaagaaaaacggcctgcgggtgacgcctgctgatcagatagacattatcaccggagcactggcgggaacggcaaataaaaccctgttggcatgggcgaagaaacatcagattgcggccgtaggtttgtttctcggtgacggcgacagcgtcaaagtgacccagcttgatgaagagttaggtcatgttggactggcgcagccaggtagccctaagcttatcaactccttgctggagaacggttatctgccggtggtcagctccattggcgtaacagacgaagggcaactgatgaacgtcaatgccgaccaggcggcaacggcgctggcggcaacgctgggcgcggatctgattttgctctccgacgtcagcggcattctcgacggcaaagggcaacgcattgccgaaatgaccgccgcgaaagcagaacaactgattgagcagggcattattactgacggcatgatagtgaaagtgaacgcggcgctggatgcggcccgcacgctgggccgtccggtagatatcgcctcctggcgtcatgcggagcagcttccggcactgtttaacggtatgccgatgggtacgcggattttagcttaagttttgttggccggaggcgcagctttccggcattgaatttcaaaataaggaaacagagttatggcactttggggcgggcgttttacccaggcagcagatcaacggttcaaacaattcaacgacagtctgcgctttgattaccgtctggcggagcaggatattgttggctctgtggcctggtccaaagccctggtcacggtaggcgtgttaaccgcagaagagcaggcgcaactggaagaggcgctgaacgtgttgctggaagatgttcgcgccaggccacaacaaatccttgaaagcgacgccgaagatatccatagctgggtggaaggcaaactgatcgacaaagtgggccagttaggcaaaaagctgcataccgggcgtagccgtaatgatcaggtagcgactgacctgaaactgtggtgcaaagataccgttagcgagttactgacggctaaccggcagctgcaaagcgcgctggtggaaaccgcacaaaacaatcaggacgcggtaatgccaggttacactcacctgcaacgcgcccagccggtgacgttcgcgcactggtgcctggcctatgttgagatgctggcgcgtgatgaaagccgtttgcaggatgcgcttaagcgtctggatgtcagcccgctaggctgtggcgcgctggcgggaacggcctatgaaatcgaccgtgaacagttagcaggctggctgggctttgctagcgcgacccgtaacagtctcgacagcgtttctgaccgtgaccatgtgttggaactgctttctgctgccgctatcggcatggtgcatctgagccgttttgctgaagatctgattttctttaacaccggcgaagcggggtttgtggagctttctgaccgcgtgacttccggtagtagtttaatgccgcagaagaaaaacccggatgcgctggagctgattcgcggtaaatgcggccgggtgcagggggcgttaaccggcatgatgatgacgctgaaaggtttgccgctggcttacaacaaagatatgcaggaagacaaagaaggtctgttcgacgcgctcgatacctggctggactgcctgcatatggcggcgctggtgctggacggcattcaggtgaaacgtccacgttgccaggaagcggctcagcagggttacgccaacgccaccgaactggcggattatctggtggcgaaaggcgtaccgttccgcgaggcgcaccatattgttggtgaagcggtggtggaagccattcgtcagggcaaaccgctggaagatctgccgctcagtgagttgcagaaattcagtcaggtgattgacgaagatgtctatccgattctgagcctgcaaagctgcctcgacaagcgtgcggcaaaaggcggcgtcagtccgcagcaggtggcgcaggcgattgcttttgcgcaggctcggttagggtaagaacatttatatgtataaatttgagcctggcttatcgccgggcttttttatggcaaaaaaaagcggatcctggagatccgcaaaagttcacgttggctttagttattcgagttgagaaactctcgaaacgggcagtgacttcaagggttaaaagaggtgccgctccgtttctgtgagcaattatcagtcagaatgcttgatagggataatcgttcattgctattctacctatcgccatgaactatcgtggcgatggaggatggataatgaatattcgtgatcttgagtacctggtggcattggctgaacaccgccattttcggcgtgcggcagattcctgccacgttagccagccgacgcttagcgggcaaattcgtaagctggaagatgagctgggcgtgatgttgctggagcggaccagccgtaaagtgttgttcacccaggcgggaatgctgctggtggatcaggcgcgtaccgtgctgcgtgaggtgaaagtccttaaagagatggcaagccagcagggcgagacgatgtccggaccgctgcacattggtttgattcccacagttggaccgtacctgctaccgcatattatccctatgctgcaccagacctttccaaagctggaaatgtatctgcatgaagcacagacccaccagttactggcgcaactggacagcggcaaactcgattgcgtgatcctcgcgctggtgaaagagagcgaagcattcattgaagtgccgttgtttgatgagccaatgttgctggctatctatgaagatcacccgtgggcgaaccgcgaatgcgtaccgatggccgatctggcaggggaaaaactgctgatgctggaagatggtcactgtttgcgcgatcaggcaatgggtttctgttttgaagccggggcggatgaagatacacacttccgcgcgaccagcctggaaactctgcgcaacatggtggcggcaggtagcgggatcactttactgccagcgctggctgtgccgccggagcgcaaacgcgatggggttgtttatctgccgtgcattaagccggaaccacgccgcactattggcctggtttatcgtcctggcagtccgctgcgcagccgctatgagcagctggcagaggccatccgcgcaagaatggatggccatttcgataaagttttaaaacaggcggtttaaaccgtttaacgcagctacccgataggcttccgccatcgtcgggtagttaaaggtggtgttgacgaagtactcaatagtgttgccgccacctttctgttccataatcgcctgaccgatatgaataatttcggcagcgcgctcgccaaagcagtgaatacccagaatctcttttgtttcccgatggaacaaaattttcagcgtgcccacgttcatgccgacgatttgtgcgcgtgccagatgtttaaactgggcgcggcccacttcatatggcactttcattgcggtcagctgctgttcggttttgcccacagagctgatttccgggatggtgtaaataccggtagggatatcttcaatcagatgtgcggtggcttcgccttttaccagcgcctgcgcggcaatgcgcccctggtcataggccgcgctcgccaggctcggataaccaatcacgtcgcccaccgcgtaaacgtgtggctgtgcggtctgatacatgctgttgaccttcagctgtccgcggctgtcagtttctagcccaatgttctgtaacgccaggctatcggtattaccggtgcgaccgttggcatagagcaggcagtcagctttcagttttttaccgctcttcagatgcatgatcacaccatcgtcacagccttcgatcttctcgtactcttcgttgtgacgaatcactacgccactgttccagaagtgataggagagagaatcactcatctcttgatcgagaaatgccagcaggcgatcgcgggtgttgatcagatccacttttacatccataccgcggaagatgctcgcatattcacagccgatcactccagcaccatagataagtacatggcgcggttcgtggtgcatgctgagaatactgtcgctgtcgtaaatgcgtggatgggtgaaatcaacatctgttggatgatatggacgagagccgcaggcaataacaaatttttcagcggttagtgtttcaacgctgccgtccgggcaatccagcgccaacgtatgctcgtcaacaaagcgagcgtttccctgcaatatttcacagtgattacgttcgtaaaatccctgacgcatgcgcgtttgttgattaatcacgttatcggcatggttaaggatatcggcaaaagaagagcggagcagtcgggaatggtcgctgtaaagtgggttttgattgaattctataatgcggctgacggcgtgacggagagctttgctcgggatggtgccccagtgggtgcaaccgccgccaacattttgataacgctcgataactgcgacgcgcgcaccttgcttaaccaggcccattgcagcgccttcgccgccggggccggaacctattactatggcatcgtaatcgtaggaatgtggcatggtagggcttacctgttcttatacataaaagcaacagaatggtaacattttatcgcgggtaagccaattgatccccgtcatttatctggctatatcctgagcggcctttgctttgtctgtttcttacttttgccctgacgttttattggatttttatcgacgatactctccgtttaagcggcaggtttccgctgtacgtaaaagaaccggccaaagaattgcagtaaatatgttttattgcgttaccgttcattcacaatactggagcaatccagtatgttcattctctggtatagtgccagcagtacttttggcaaggatagtgacatcgtgatgggcgtaagagcgcaacaaaaagaaaaaacccgccgtagcctggtggaagccgcatttagccaattaagtgctgaacgcagcttcgccagcctgagtttgcgtgaagtggcgcgtgaagcgggcattgctcccacctctttttatcggcatttccgcgacgtagacgaactgggtctgaccatggttgatgagagcggtttaatgctacgccaactcatgcgccaggcgcgtcagcgtatcgccaaaggcgggagtgtgatccgcaccagcgtctccacatttatggagttcatcggtaataatcctaacgccttccggttattattgcgggaacgctccggcacctccgctgcgtttcgtgccgccgttgcgcgtgaaattcagcacttcattgcggaacttgcggactatctggaactcgaaaaccatatgccgcgtgcgtttactgaagcgcaagccgaagcaatggtgacaattgtcttcagtgcgggtgccgaggcgttggacgtcggcgtcgaacaacgtcggcaattagaagagcgactggtactgcaactgcgaatgattagcaaaggggcttattactggtatcgccgtgaacaagagaaaaccgcaattattccgggaaatgtgaaggacgagtaatgaaacaagcaaatcaagatagaggtacgctgctgctggcgttagttgctggcttaagcattaatggtactttcgcagcgctgtttagctccattgtgccattttctgtattcccgattatttccctggtgctgacggtttactgcctgcatcaacgttatcttaatcgcactatgccggtaggcttgccgggtctggcagctgcctgttttattctcggcgtactgctgtacagcacggtagttcgtgcggaatatccggatatcggctctaacttcttcccggcagtactctccgtcattatggtgttctggattggcgcgaagatgcgtaaccgtaagcaggaagttgctgagtaatcggtattatgccggatgctggcgcatccggcatgggttttacttcgcggtcagtaatacgccgcactccatatggtgcgtgtaggggaactgatcaaacagagccagacgttcgaccttgtgcgtctggcttaatgtttccagattcttgcataacgtttccgggttacaggagatgtacaaaatacgcggatacgcctgcaccattttctcggtttcactgtccagaccgctgcgcggagggtcgacaaaaatggtttcgcactgataactctttaagtcgatcccttgcaggcggttaaactcgcgcacaccattcatcgcctgagtaaattcttctgccgccatacgaataatttgtacgttatcaatatggttagctgcgatgttgtattgcgcagcagcaacgctcggcttagcgatttcggtggctaatacccgatcaaaattacgcgccagcgctaaactaaagttaccgttgccgcagtacagctccagtaaatcgcctttactgcctttggttacgtccagcgcccattccagcatctgaatattcatcgccgcgttcggctgggtaaagctgttttctacctgacggtagatcatctctttccctgcgaccggcagacgttcatcgatgtaatcctgatccagctcgattttggttttcgttgcccgaccaatcagatgcacattcagattctgcgcgcgcagtgcatcgcgcagggcctccgcttcctgacgccactcatcatccagcttcttatggtatagcagggaaaccaccgcctgattactcagtgtagtgaggtaatcaatctggaacaacttgtggcgcagaacgggattattacgcacacccgcaatcatcgccgtcatcaactggttgataagttcactggcggcggggaagctatccacgcggatgcggcttttggtttgttgatcgaaaatgatgtgatacaggtcatcgccatcgtgccagatgcggaactccgcgcgcatccggtaatgactgaccgggctgcgaaacacttccggaaccaggtcagaaaacggtgccatcatactttgcaaacgtaccactttttcggctaactgcgcttcatactgttctgttggaaggtgttcgggggtcatgatgtatcctgaaaaattaaagtacgcggcgattgtagggattgctcatcagatgtccagatcttgatgaattcctatttgtgagctacgtctggacagtaacttgttacaacctgtagcatccacttgccggtcctgtgagttaatagggaatccagtgcgaatctggagctgacgcgcagcggtaaggaaaggtgcgatgattgcgttatgcggacactgccattcggtgggaagtcatcatctcttagtatcttagatacccctccaagcccgaagacctgccggccaacgtcgcatctggttctcatcatcgcgtaatattgatgaaacctgcggcatccttcttctattgtggatgctttacaatgattaaaaaagctagcctgctgacggcgtgttccgtcacggcattttccgcttgggcacaggataccagcccggatactctcgtcgttactgctaaccgttttgaacagccgcgcagcactgtgcttgcaccaaccaccgttgtgacccgtcaggatatcgaccgctggcagagcaccagcgtcaatgatgtgctgcgccgtcttccgggcgtcgatatcacccaaaacggcggtagtggtcagctcagttctatttttattcgcggtacaaatgccagtcatgtgttggtgttaattgatggcgtacgcctgaatctggcgggggtgagtggttctgccgaccttagccagttccctattgcgcttgtccagcgtgttgaatatatccgtgggccgcgctccgctgtttatggttccgatgcaataggcggggtggtgaatatcatcacgacgcgcgatgaacccggaacggaaattagtgcagggtggggaagcaatagttatcagaactatgatgtctctacgcagcaacaactgggggataagacacgggtaacgctgttgggcgattatgcccatactcatggttatgatgttgttgcctatggtaataccggaacgcaagcgcagacagataacgatggttttttaagtaaaacgctttatggcgcgctggagcataactttactgatgcctggagcggctttgtgcgcggctatggctatgataaccgtaccaattatgacgcgtattattctcccggtagtccgttgctcgatacccgtaaactctatagccaaagttgggacgccgggctgcgctataacggcgaactgattaaaagtcaactcattaccagctatagccatagcaaagattacaactacgatccccattatggtcgttatgatagcagcgcgacgctcgatgagatgaagcaatacaccgtccagtgggcaaacaatgtcatcgttggtcacggtagtattggtgcgggtgtcgactggcagaaacagactacgacgccgggtacaggttatgttgaggatggatatgatcaacgtaataccggcatctatctgaccgggctgcaacaagtcggcgattttacctttgaaggcgcagcacgcagtgacgataacagtcagtttggtcgtcatggaacctggcaaaccagcgccggttgggaattcatcgaaggttatcgcttcattgcttcctacgggacatcttataaggcaccaaatctggggcaactgtatggcttctacggaaatccgaatctggacccggagaaaagcaaacagtgggaaggcgcgtttgaaggcttaaccgctggggtgaactggcgtatttccggatatcgtaacgatgtcagtgacttgatcgattatgatgatcacaccctgaaatattacaacgaagggaaagcgcggattaagggcgtcgaggcgaccgccaattttgataccggaccactgacgcatactgtgagttatgattatgtcgatgcgcgcaatgcgattaccgacacgccgttgttacgccgtgctaaacagcaggtgaaataccagctcgactggcagttgtatgacttcgactggggtattacttatcagtatttaggcactcgctatgataaggattacagttcttatccttatcaaaccgttaaaatgggcggtgtgagcttgtgggatcttgcggttgcgtatccggtcacctctcacctgacagttcgtggtaaaatagccaacctgttcgacaaagattatgagacagtctatggctaccaaactgcaggacgggaatacaccttgtctggcagctacaccttctgaaccacgtcccaccgtgctggtgtttgactccggcgtcggtgggttgagcgtctatgacgagatccggcatctcttaccggatctccattacatttatgctttcgataacgtcgctttcccgtatggcgaaaaaagcgaagcgtttattgttgagcgagtggtggcaattgtcaccgcggtgcaagaacgttatccccttgcgctggctgtggtcgcttgcaacactgccagtaccgttagtcttcctgcattacgcgaaaagttcgacttcccggttgttggtgtcgtgccggcgattaaacctgctgcacgtctgacggcaaatggcattgtcggattactggcaacccgcggaacagttaaacgttcttatactcatgagctgatcgcgcgtttcgctaatgaatgccagatagaaatgctgggcagcgcagagatggttgagttggctgaagcgaagctacatggcgaagatgtttctctggatgcactaaaacgtatcctacgcccgtggttaagaatgaaagagccgccagataccgttgtattgggttgcacccatttccctctactacaagaagaactgttacaagtgctgccagagggaacccggctggtggattctggcgcagcgattgctcgccgaacggcctggttgttagaacatgaagccccggatgcaaaatctgccgatgcgaatattgccttttgtatggcaatgacgccaggagctgaacaattattgcccgttttacagcgttacggcttcgaaacgctcgaaaaactggcagttttaggctgatttggttgaatgttgcgcggtcagaaaattattttaaatttcctcttgtcaggccggaataactccctataatgcgccaccactgacacggaacaacggcaaacacgccgccgggtcagcggggttctcctgagaactccggcagagaaagcaaaaataaatgcttgactctgtagcgggaaggcgtattatgcacaccccgcgccgctgagaaaaagcgaagcggcactgctctttaacaatttatcagacaatctgtgtgggcactcgaagatacggattcttaacgtcgcaagacgaaaaatgaataccaagtctcaagagtgaacacgtaattcattacgaagtttaattctttgagcgtcaaacttttaaattgaagagtttgatcatggctcagattgaacgctggcggcaggcctaacacatgcaagtcgaacggtaacaggaagaagcttgcttctttgctgacgagtggcggacgggtgagtaatgtctgggaaactgcctgatggagggggataactactggaaacggtagctaataccgcataacgtcgcaagaccaaagagggggaccttcgggcctcttgccatcggatgtgcccagatgggattagctagtaggtggggtaacggctcacctaggcgacgatccctagctggtctgagaggatgaccagccacactggaactgagacacggtccagactcctacgggaggcagcagtggggaatattgcacaatgggcgcaagcctgatgcagccatgccgcgtgtatgaagaaggccttcgggttgtaaagtactttcagcggggaggaagggagtaaagttaatacctttgctcattgacgttacccgcagaagaagcaccggctaactccgtgccagcagccgcggtaatacggagggtgcaagcgttaatcggaattactgggcgtaaagcgcacgcaggcggtttgttaagtcagatgtgaaatccccgggctcaacctgggaactgcatctgatactggcaagcttgagtctcgtagaggggggtagaattccaggtgtagcggtgaaatgcgtagagatctggaggaataccggtggcgaaggcggccccctggacgaagactgacgctcaggtgcgaaagcgtggggagcaaacaggattagataccctggtagtccacgccgtaaacgatgtcgacttggaggttgtgcccttgaggcgtggcttccggagctaacgcgttaagtcgaccgcctggggagtacggccgcaaggttaaaactcaaatgaattgacgggggcccgcacaagcggtggagcatgtggtttaattcgatgcaacgcgaagaaccttacctggtcttgacatccacggaagttttcagagatgagaatgtgccttcgggaaccgtgagacaggtgctgcatggctgtcgtcagctcgtgttgtgaaatgttgggttaagtcccgcaacgagcgcaacccttatcctttgttgccagcggtccggccgggaactcaaaggagactgccagtgataaactggaggaaggtggggatgacgtcaagtcatcatggcccttacgaccagggctacacacgtgctacaatggcgcatacaaagagaagcgacctcgcgagagcaagcggacctcataaagtgcgtcgtagtccggattggagtctgcaactcgactccatgaagtcggaatcgctagtaatcgtggatcagaatgccacggtgaatacgttcccgggccttgtacacaccgcccgtcacaccatgggagtgggttgcaaaagaagtaggtagcttaaccttcgggagggcgcttaccactttgtgattcatgactggggtgaagtcgtaacaaggtaaccgtaggggaacctgcggttggatcacctccttaccttaaagaagcgtactttgtagtgctcacacagattgtctgatagaaagtgaaaagcaaggcgtttacgcgttgggagtgaggctgaagagaataaggccgttcgctttctattaatgaaagctcaccctacacgaaaatatcacgcaacgcgtgataagcaattttcgtgtccccttcgtctagaggcccaggacaccgccctttcacggcggtaacaggggttcgaatcccctaggggacgccacttgctggtttgtgagtgaaagtcgccgaccttaatatctcaaaactcatcttcgggtgatgtttgagatatttgctctttaaaaatctggatcaagctgaaaattgaaacactgaacaacgagagttgttcgtgagtctctcaaattttcgcaacacgatgatgaatcgaaagaaacatcttcgggttgtgaggttaagcgactaagcgtacacggtggatgccctggcagtcagaggcgatgaaggacgtgctaatctgcgataagcgtcggtaaggtgatatgaaccgttataaccggcgatttccgaatggggaaacccagtgtgtttcgacacactatcattaactgaatccataggttaatgaggcgaaccgggggaactgaaacatctaagtaccccgaggaaaagaaatcaaccgagattcccccagtagcggcgagcgaacggggagcagcccagagcctgaatcagtgtgtgtgttagtggaagcgtctggaaaggcgcgcgatacagggtgacagccccgtacacaaaaatgcacatgctgtgagctcgatgagtagggcgggacacgtggtatcctgtctgaatatggggggaccatcctccaaggctaaatactcctgactgaccgatagtgaaccagtaccgtgagggaaaggcgaaaagaaccccggcgaggggagtgaaaaagaacctgaaaccgtgtacgtacaagcagtgggagcacgcttaggcgtgtgactgcgtaccttttgtataatgggtcagcgacttatattctgtagcaaggttaaccgaataggggagccgaagggaaaccgagtcttaactgggcgttaagttgcagggtatagacccgaaacccggtgatctagccatgggcaggttgaaggttgggtaacactaactggaggaccgaaccgactaatgttgaaaaattagcggatgacttgtggctgggggtgaaaggccaatcaaaccgggagatagctggttctccccgaaagctatttaggtagcgcctcgtgaattcatctccgggggtagagcactgtttcggcaagggggtcatcccgacttaccaacccgatgcaaactgcgaataccggagaatgttatcacgggagacacacggcgggtgctaacgtccgtcgtgaagagggaaacaacccagaccgccagctaaggtcccaaagtcatggttaagtgggaaacgatgtgggaaggcccagacagccaggatgttggcttagaagcagccatcatttaaagaaagcgtaatagctcactggtcgagtcggcctgcgcggaagatgtaacggggctaaaccatgcaccgaagctgcggcagcgacgcttatgcgttgttgggtaggggagcgttctgtaagcctgcgaaggtgtgctgtgaggcatgctggaggtatcagaagtgcgaatgctgacataagtaacgataaagcgggtgaaaagcccgctcgccggaagaccaagggttcctgtccaacgttaatcggggcagggtgagtcgacccctaaggcgaggccgaaaggcgtagtcgatgggaaacaggttaatattcctgtacttggtgttactgcgaaggggggacggagaaggctatgttggccgggcgacggttgtcccggtttaagcgtgtaggctggttttccaggcaaatccggaaaatcaaggctgaggcgtgatgacgaggcactacggtgctgaagcaacaaatgccctgcttccaggaaaagcctctaagcatcaggtaacatcaaatcgtaccccaaaccgacacaggtggtcaggtagagaataccaaggcgcttgagagaactcgggtgaaggaactaggcaaaatggtgccgtaacttcgggagaaggcacgctgatatgtaggtgaggtccctcgcggatggagctgaaatcagtcgaagataccagctggctgcaactgtttattaaaaacacagcactgtgcaaacacgaaagtggacgtatacggtgtgacgcctgcccggtgccggaaggttaattgatggggttagcgcaagcgaagctcttgatcgaagccccggtaaacggcggccgtaactataacggtcctaaggtagcgaaattccttgtcgggtaagttccgacctgcacgaatggcgtaatgatggccaggctgtctccacccgagactcagtgaaattgaactcgctgtgaagatgcagtgtacccgcggcaagacggaaagaccccgtgaacctttactatagcttgacactgaacattgagccttgatgtgtaggataggtgggaggctttgaagtgtggacgccagtctgcatggagccgaccttgaaataccaccctttaatgtttgatgttctaacgttgacccgtaatccgggttgcggacagtgtctggtgggtagtttgactggggcggtctcctcctaaagagtaacggaggagcacgaaggttggctaatcctggtcggacatcaggaggttagtgcaatggcataagccagcttgactgcgagcgtgacggcgcgagcaggtgcgaaagcaggtcatagtgatccggtggttctgaatggaagggccatcgctcaacggataaaaggtactccggggataacaggctgataccgcccaagagttcatatcgacggcggtgtttggcacctcgatgtcggctcatcacatcctggggctgaagtaggtcccaagggtatggctgttcgccatttaaagtggtacgcgagctgggtttagaacgtcgtgagacagttcggtccctatctgccgtgggcgctggagaactgaggggggctgctcctagtacgagaggaccggagtggacgcatcactggtgttcgggttgtcatgccaatggcactgcccggtagctaaatgcggaagagataagtgctgaaagcatctaagcacgaaacttgccccgagatgagttctccctgaccctttaagggtcctgaaggaacgttgaagacgacgacgttgataggccgggtgtgtaagcgcagcgatgcgttgagctaaccggtactaatgaaccgtgaggcttaaccttacaacgccgaagctgttttggcggatgagagaagattttcagcctgatacagattaaatcagaacgcagaagcggtctgataaaacagaatttgcctggcggcagtagcgcggtggtcccacctgaccccatgccgaactcagaagtgaaacgccgtagcgccgatggtagtgtggggtctccccatgcgagagtagggaactgccaggcatcaaataaaacgaaaggctcagtcgaaagactgggcctttcgttttatctgttgtttgtcggtgaacgctctcctgagtaggacaaatccgccgggagcggatttgaacgttgcgaagcaacggcccggagggtggcgggcaggacgcccgccataaactgccaggcatcaaattaagcagaaggccatcctgacggatggcctttttgcgtttctacaaactcttcctgtcgtcatatctacaagccatccccccacagatacggtaaactagcctcgtttttgcatcaggaaagcagctatgaaccactccttaaaaccctggaacacatttggcattgatcataatgctcagcacattgtatgtgccgaagacgaacaacaattactcaatgcctggcagtatgcaaccgcagaaggacaacccgttcttattctgggtgaaggaagtaatgtactttttctggaggactatcgcggcacggtgatcatcaaccggatcaaaggtatcgaaattcatgatgaacctgatgcgtggtatttacatgtaggagccggagaaaactggcatcgtctggtaaaatacactttgcaggaaggtatgcctggtctggaaaatctggcattaattcctggttgtgtcggcagtagtcctatccagaatattggtgcttatggcgtagaattacagcgagtttgcgcttatgttgattctgttgaactggcgacaggcaagcaagtgcgcttaactgccaaagagtgccgttttggctatcgcgacagtatttttaaacatgaataccaggaccgcttcgctattgtagccgtaggtctgcgtctgccaaaagagtggcaacctgtactaacgtatggtgacttaactcgtctggatcctacaacagtaacgccacagcaagtatttaatgcggtgtgtcatatgcgcaccaccaaactccctgatccaaaagtgaatggcaatgccggtagtttcttcaaaaaccctgttgtatctgccgaaacggctaaagcattactgagtcaatttccaacagcaccaaattacccccaggcggatggtagtgtaaaactggcagcaggttggcttatcgatcagtgccagctaaaagggatgcaaataggtggggctgcggtgcaccgtcaacaggcgttagttctcattaatgaagacaatgcaaaaagcgaagatgttgtacagctggcgcatcatgtaagacagaaagttggtgaaaaatttaatgtctggcttgagcctgaagtccgctttattggtgcaagtggtgaagtgagcgcagtggagacaattagttgaaataaagcgcagtggagacaatttcatgaaggataacaccgtgccactgaaattgattgccctgttagcgaacggtgaatttcactctggcgagcagttgggtgaaacgctgggaatgagccgggcggctattaataaacacattcagacactgcgtgactggggcgttgatgtctttaccgttccgggtaaaggatacagcctgcctgagcctatccagttacttaatgctaaacagatattgggtcagctggatggcggtagtgtagccgtgctgccagtgattgactccacgaatcagtaccttcttgatcgtatcggagagcttaaaagcggcgatgcttgcattgcagaataccagcaggctggccgtggtcgccggggtcggaaatggtttagcccttttggcgcaaacttatatttgagcatgttctggcgtctggaacaaggcccggcggcggcgattggtttaagtctggttatcggtatcgtgatggcggaagtattacgcaagctgggtgcagataaagttcgtgttaaatggcctaatgacctctatctgcaggatcgcaagctggcaggcattctggtggagctgactggcaaaactggcgatgcggcgcaaatagtcattggagccgggatcaacatggcaatgcgccgtgttgaagagagtgtcgttaatcaggggtggatcacgctgcaggaagcggggatcaatctcgatcgtaatacgttggcggccatgctaatacgtgaattacgtgctgcgttggaactcttcgaacaagaaggattggcaccttatctgagccgctgggaaaagctggataattttattaatcgcccagtgaaacttatcattggtgataaagaaatatttggcattagtcgcggaatagacaaacagggggctttattacttgagcaggatggaataataaaaccctggatgggcggtgaaatatccctgcgtagtgcagaaaaataagaaaggggagtattcgctcccctgcaaattatttgcgtagtctgacctcttctaccgcatgattagcacttttcgtcaggattaaactggcgcgctcacgagtaggtagaatattttgctttaagttcagccagttgatctctttccacaatgtcatggcagtcttaatcgcttcttctttagttaatttcgcgtagttatgaaaataggaatccgggtcggtaaaagccccttcgcggaatttcagaaaacggttgatataccatgtctgaagtaagtcttccggtgcatcaacatatatgctaaaatcgacaaaatcagaaacaaatacatgatgtggatcgtgtggataatccatcccgctctgtaagacatttaacccttcaagaattaaaatatcaggctgaacaaccgttttatctccatccgggatcacatcataaataagatgactgtaaacaggtgctgtaacgtttggcacgccggatttgagatcggaaacaaacttcaccaggcgatgcatatcatagctttccgggaagcctttcttcttcatcagaccacgttctttcagaacctgattagggtgaaggaagccatctgtagtgatcagttcaacacgacgatgttccggccaacggcttaatagcgcctgcaatacacgggcggttgtacttttccccaccgcgacactgccagcaatactgataatgtaaggaatgcgttgcccgttggtaccaagaaactgttccagaactgcctgacggcgcagattgctgcttatatagaagttcagcaaacgactcaaaggtaaatagatctcggcaacttcttctaagctgagatcttcattaatacctttgagacgggcgatctcatcttcgcttaacgtcataggtacggaatcacgcagagctgcccactggttgcggtcaaactgtaggtaaggcgtcattaacgtttgctcttttatactcataagcatgtttctggcggtcatagctctatcggcaaagcgatatttgccatggcgcgtcacagttctgttgaatgggttaatgggcaggagggtaacaccagatggggaggaataataagaaaaaatctctgccaggaagctatcgttgaaaagcaatgtgacagatattccatctgataaaaagaattatggtttagcaggagcgcattgttgagcacaatgatgttgaaaaagtgtgctaatctgccctccgttcggctgtttcttcatcgtgtcgcataaaatgtgaccaataaaacaaattatgcaattttttagttgcatgaactcgcatgtctccatagaatgcgcgctacttgatgccgacttagctcagtaggtagagcaactgacttgtaatcagtaggtcaccagttcgattccggtagtcggcaccatcaagtccggtggggttcccgagcggccaaagggagcagactgtaaatctgccgtcacagacttcgaaggttcgaatccttcccccaccaccaatttcggccacgcgatggcgtagcccgagacgataagttcgcttaccggctcgaataaagagagcttctctcgatattcagtgcagaatgaaaatcaggtagccgagttccaggatgcgggcatcgtataatggctattacctcagccttccaagctgatgatgcgggttcgattcccgctgcccgctccaagatgtgctgatatagctcagttggtagagcgcacccttggtaagggtgaggtcggcagttcgaatctgcctatcagcaccacttcttttctcctccctgttttttccttctgtttattgcattcaacaagtcgggcatgttgcctggttgatgtggtgatatcaccgatttatccgtgtcttagagggacaatcgatgtctaaagaaaagtttgaacgtacaaaaccgcacgttaacgtcggtactatcggccacgttgaccatggtaaaacaacgctgaccgctgcaatcactaccgtactggctaaaacctacggcggtgctgctcgcgcattcgaccagatcgataacgcgccggaagaaaaagctcgtggtatcaccatcaacacttctcacgttgaatacgacaccccgacccgtcactacgcacacgtagactgcccggggcacgccgactatgttaaaaacatgatcaccggtgctgcgcagatggacggcgcgatcctggtagttgctgcgactgacggcccgatgccgcagactcgtgagcacatcctgctgggtcgtcaggtaggcgttccgtacatcatcgtgttcctgaacaaatgcgacatggttgatgacgaagagctgctggaactggttgaaatggaagttcgtgaacttctgtctcagtacgacttcccgggcgacgacactccgatcgttcgtggttctgctctgaaagcgctggaaggcgacgcagagtgggaagcgaaaatcctggaactggctggcttcctggattcttacattccggaaccagagcgtgcgattgacaagccgttcctgctgccgatcgaagacgtattctccatctccggtcgtggtaccgttgttaccggtcgtgtagaacgcggtatcatcaaagttggtgaagaagttgaaatcgttggtatcaaagagactcagaagtctacctgtactggcgttgaaatgttccgcaaactgctggacgaaggccgtgctggtgagaacgtaggtgttctgctgcgtggtatcaaacgtgaagaaatcgaacgtggtcaggtactggctaagccgggcaccatcaagccgcacaccaagttcgaatctgaagtgtacattctgtccaaagatgaaggcggccgtcatactccgttcttcaaaggctaccgtccgcagttctacttccgtactactgacgtgactggtaccatcgaactgccggaaggcgtagagatggtaatgccgggcgacaacatcaaaatggttgttaccctgatccacccgatcgcgatggacgacggtctgcgtttcgcaatccgtgaaggcggccgtaccgttggcgcgggcgttgtagcaaaagttctgagctaattgccgataacatttgacgcaatgcgcactaaaagggcatcatttgatgccctttttgcacgctttcgtaccagaacctggctcatcagtgattttctttgtcataatcattgctgagacaggctctgttgagggcgtataatccgaaaagctaatacgcgtttcgatttggtttgcctcgcgatcgcggggtgaaaatgtttgtagaaaacttctgacaggttggtttatgagtgcgaataccgaagctcaaggaagcgggcgcggcctggaagcgatgaagtgggtcgttgtggtggcattgctcctggtggcgattgtcggcaactatctttatcgcgacattatgctgccgctgcgtgcgctggccgtagtaattctgattgctgcagcgggtggtgtcgcgctgttaacgacaaaaggtaaagctaccgttgcttttgcccgtgaagcgcgtaccgaagtccgtaaggtcatttggccgactcgccaggaaacattgcacaccacgctgattgtggctgcggttaccgcagtaatgagtctgatcctgtggggactggatggtattctggttcgcctggtatcctttatcactggcctgaggttctgagatgtctgaagctcctaaaaagcgctggtacgtcgttcaggcgttttccggttttgaaggccgcgtagcaacgagcctgcgtgagcatatcaaattacacaacatggaagatttgtttggtgaagtcatggtaccaaccgaagaagtggttgaaatccgtggcggtcagcgtcgcaaaagcgaacgtaaattcttccctggctacgtcctcgttcagatggtgatgaacgacgcgagctggcacctggtgcgcagcgtaccgcgtgtgatgggcttcatcggcggtacttccgatcgtcctgcgccaatcagcgataaagaagtcgatgcgattatgaaccgcctgcagcaggttggtgataagccgcgtccgaaaacgctgtttgaaccgggtgaaatggtccgtgttaatgatggtccgttcgctgacttcaacggtgttgttgaagaagtggattacgagaaatctcgtctgaaagtgtctgtttctatcttcggtcgtgcgaccccggtagagctggacttcagccaggttgaaaaagcctaacccagcgatcaaaaaagcggcgatttaatcgttgcacaaggcgtgagattggaatacaatttcgcgccttttgtttttatgggccttgcccgtaaaacgattttttatatcacggggagcctctcagaggcgttattacccaacttgaggaatttataatggctaagaaagtacaagcctatgtcaagctgcaggttgcagctggtatggctaacccgagtccgccagtaggtccggctctgggtcagcagggcgtaaacatcatggaattctgcaaagcgttcaacgcaaaaactgattccatcgaaaaaggtctgccgattccggtagtaatcaccgtttacgctgaccgttctttcactttcgttaccaagaccccgccggcagcagttctgctgaaaaaagcggctggtatcaagtctggttccggtaagccgaacaaagacaaagtgggtaaaatttcccgcgctcagctgcaggaaatcgcgcagaccaaagctgccgacatgactggtgccgacattgaagcgatgactcgctccatcgaaggtactgcacgttccatgggcctggtagtggaggactaagaaatggctaaactgaccaagcgcatgcgtgttatccgcgagaaagttgatgcaaccaaacagtacgacatcaacgaagctatcgcactgctgaaagagctggcgactgctaaattcgtagaaagcgtggacgtagctgttaacctcggcatcgacgctcgtaaatctgaccagaacgtacgtggtgcaactgtactgccgcacggtactggccgttccgttcgcgtagccgtatttacccaaggtgcaaacgctgaagctgctaaagctgcaggcgcagaactggtaggtatggaagatctggctgaccagatcaagaaaggcgaaatgaactttgacgttgttattgcttctccggatgcaatgcgcgttgttggccagctgggccaggttctgggtccgcgcggcctgatgccaaacccgaaagtgggtactgtaacaccgaacgttgctgaagcggttaaaaacgctaaagctggccaggttcgttaccgtaacgacaaaaacggcatcatccacaccaccatcggtaaagtggactttgacgctgacaaactgaaagaaaacctggaagctctgctggttgcgctgaaaaaagcaaaaccgactcaggcgaaaggcgtgtacatcaagaaagttagcatctccaccaccatgggtgcaggtgttgcagttgaccaggctggcctgagcgcttctgtaaactaatgcctttacgtgggcggtgattttgtctacaatcttacccccacgtataatgcttaatgcagacgtatatccgagatattcgggttgtggcaaggcggcaactgagtgagtcgccaggagcatagctaactatgtgactggtgcgaatgaaggaagccaacgccgtcacaagctgaatagcgacggatagaaaagatttgttcgttggagcctggcctatccaggcctccgtcgaagaccgcaggagtttcgcaagaaacttaatcccctgcgtagacggtgacagaacgctaagattattcttttatattctggcttgtttctgctcaccgtaattaagacgctctctccgtttggaggagtgaagtgagttccagagattttctctggcaaacatccaggagcaaagctaatggctttaaatcttcaagacaaacaagcgattgttgctgaagtcagcgaagtagccaaaggcgcgctgtctgcagtagttgcggattcccgtggcgtaactgtagataaaatgactgaactgcgtaaagcaggtcgcgaagctggcgtatacatgcgtgttgttcgtaacaccctgctgcgccgtgctgttgaaggtactccgttcgagtgcctgaaagacgcgtttgttggtccgaccctgattgcatactctatggaacacccgggcgctgctgctcgtctgttcaaagagttcgcgaaagcgaatgcaaaatttgaggtcaaagccgctgcctttgaaggtgagctgatcccggcgtctcagatcgaccgcctggcaactctgccgacctacgaagaagcaattgcacgcctgatggcaaccatgaaagaagctagcgctggcaaactggttcgtactctggctgctgtacgcgatgcgaaagaagctgcttaatcgcagttatctttttaacgcattcgcttacgtataaacttattctgatattcaggaacaatttaaatgtctatcactaaagatcaaatcattgaagcagttgcagctatgtctgtaatggacgttgtagaactgatctctgcaatggaagaaaaattcggtgtttccgctgctgctgctgtagctgtagctgctggcccggttgaagctgctgaagaaaaaactgaattcgacgtaattctgaaagctgctggcgctaacaaagttgctgttatcaaagcagtacgtggcgcaactggcctgggtctgaaagaagctaaagacctggtagaatctgcaccggctgctctgaaagaaggcgtgagcaaagacgacgcagaagcactgaaaaaagctctggaagaagctggcgctgaagttgaagttaaataagccaacccttccggttgcagcctgagaaatcaggctgatggctggtgactttttagtcaccagcctttttgcgctgtaaggcgccagtagcgtttcacactgtttgactactgctgtgcctttcaatgcttgtttctatcgacgacttaatatactgcgacaggacgtccgttctgtgtaaatcgcaatgaaatggtttaagcgtgatagcaacaggcattgcggaaagtgttccattttccggtcaacaaaatagtgttgcacaaactgtccgctcaatggacagatgggtcgacttgtcagcgagctgaggaaccctatggtttactcctataccgagaaaaaacgtattcgtaaggattttggtaaacgtccacaagttctggatgtaccttatctcctttctatccagcttgacagctttcagaaatttatcgagcaagatcctgaagggcagtatggtctggaagctgctttccgttccgtattcccgattcagagctacagcggtaattccgagctgcaatacgtcagctaccgccttggcgaaccggtgtttgacgtccaggaatgtcaaatccgtggcgtgacctattccgcaccgctgcgcgttaaactgcgtctggtgatctatgagcgcgaagcgccggaaggcaccgtaaaagacattaaagaacaagaagtctacatgggcgaaattccgctcatgacagacaacggtacctttgttatcaacggtactgagcgtgttatcgtttcccagctgcaccgtagtccgggcgtcttctttgactccgacaaaggtaaaacccactctagcggtaaagtgctgtataacgcgcgtatcatcccttaccgtggttcctggctggacttcgaattcgatccgaaggacaacctgttcgtacgtatcgaccgtcgccgtaaactgcctgcgaccatcattctgcgcgccctgaactacaccacagagcagatcctcgacctgttctttgaaaaagttatctttgaaatccgtgataacaagctgcagatggaactggtgccggaacgcctgcgtggtgaaaccgcatcttttgacatcgaagctaacggtaaagtgtacgtagaaaaaggccgccgtatcactgcgcgccacattcgccagctggaaaaagacgacgtcaaactgatcgaagtcccggttgagtacatcgcaggtaaagtggttgctaaagactatattgatgagtctaccggcgagctgatctgcgcagcgaacatggagctgagcctggatctgctggctaagctgagccagtctggtcacaagcgtatcgaaacgctgttcaccaacgatctggatcacggcccatatatctctgaaaccttacgtgtcgacccaactaacgaccgtctgagcgcactggtagaaatctaccgcatgatgcgccctggcgagccgccgactcgtgaagcagctgaaagcctgttcgagaacctgttcttctccgaagaccgttatgacttgtctgcggttggtcgtatgaagttcaaccgttctctgctgcgcgaagaaatcgaaggttccggtatcctgagcaaagacgacatcattgatgttatgaaaaagctcatcgatatccgtaacggtaaaggcgaagtcgatgatatcgaccacctcggcaaccgtcgtatccgttccgttggcgaaatggcggaaaaccagttccgcgttggcctggtacgtgtagagcgtgcggtgaaagagcgtctgtctctgggcgatctggataccctgatgccacaggatatgatcaacgccaagccgatttccgcagcagtgaaagagttcttcggttccagccagctgtctcagtttatggaccagaacaacccgctgtctgagattacgcacaaacgtcgtatctccgcactcggcccaggcggtctgacccgtgaacgtgcaggcttcgaagttcgagacgtacacccgactcactacggtcgcgtatgtccaatcgaaacccctgaaggtccgaacatcggtctgatcaactctctgtccgtgtacgcacagactaacgaatacggcttccttgagactccgtatcgtaaagtgaccgacggtgttgtaactgacgaaattcactacctgtctgctatcgaagaaggcaactacgttatcgcccaggcgaactccaacttggatgaagaaggccacttcgtagaagacctggtaacttgccgtagcaaaggcgaatccagcttgttcagccgcgaccaggttgactacatggacgtatccacccagcaggtggtatccgtcggtgcgtccctgatcccgttcctggaacacgatgacgccaaccgtgcattgatgggtgcgaacatgcaacgtcaggccgttccgactctgcgcgctgataagccgctggttggtactggtatggaacgtgctgttgccgttgactccggtgtaactgcggtagctaaacgtggtggtgtcgttcagtacgtggatgcttcccgtatcgttatcaaagttaacgaagacgagatgtatccgggtgaagcaggtatcgacatctacaacctgaccaaatacacccgttctaaccagaacacctgtatcaaccagatgccgtgtgtgtctctgggtgaaccggttgaacgtggcgacgtgctggcagacggtccgtccaccgacctcggtgaactggcgcttggtcagaacatgcgcgtagcgttcatgccgtggaatggttacaacttcgaagactccatcctcgtatccgagcgtgttgttcaggaagaccgtttcaccaccatccacattcaggaactggcgtgtgtgtcccgtgacaccaagctgggtccggaagagatcaccgctgacatcccgaacgtgggtgaagctgcgctctccaaactggatgaatccggtatcgtttacattggtgcggaagtgaccggtggcgacattctggttggtaaggtaacgccgaaaggtgaaactcagctgaccccagaagaaaaactgctgcgtgcgatcttcggtgagaaagcctctgacgttaaagactcttctctgcgcgtaccaaacggtgtatccggtacggttatcgacgttcaggtctttactcgcgatggcgtagaaaaagacaaacgtgcgctggaaatcgaagaaatgcagctcaaacaggcgaagaaagacctgtctgaagaactgcagatcctcgaagcgggtctgttcagccgtatccgtgctgtgctggtagccggtggcgttgaagctgagaagctcgacaaactgccgcgcgatcgctggctggagctgggcctgacagacgaagagaaacaaaatcagctggaacagctggctgagcagtatgacgaactgaaacacgagttcgagaagaaactcgaagcgaaacgccgcaaaatcacccagggcgacgatctggcaccgggcgtgctgaagattgttaaggtatatctggcggttaaacgccgtatccagcctggtgacaagatggcaggtcgtcacggtaacaagggtgtaatttctaagatcaacccgatcgaagatatgccttacgatgaaaacggtacgccggtagacatcgtactgaacccgctgggcgtaccgtctcgtatgaacatcggtcagatcctcgaaacccacctgggtatggctgcgaaaggtatcggcgacaagatcaacgccatgctgaaacagcagcaagaagtcgcgaaactgcgcgaattcatccagcgtgcgtacgatctgggcgctgacgttcgtcagaaagttgacctgagtaccttcagcgatgaagaagttatgcgtctggctgaaaacctgcgcaaaggtatgccaatcgcaacgccggtgttcgacggtgcgaaagaagcagaaattaaagagctgctgaaacttggcgacctgccgacttccggtcagatccgcctgtacgatggtcgcactggtgaacagttcgagcgtccggtaaccgttggttacatgtacatgctgaaactgaaccacctggtcgacgacaagatgcacgcgcgttccaccggttcttacagcctggttactcagcagccgctgggtggtaaggcacagttcggtggtcagcgtttcggggagatggaagtgtgggcgctggaagcatacggcgcagcatacaccctgcaggaaatgctcaccgttaagtctgatgacgtgaacggtcgtaccaagatgtataaaaacatcgtggacggcaaccatcagatggagccgggcatgccagaatccttcaacgtattgttgaaagagattcgtagcctgggtatcaacatcgaactggaagacgagtaattctcgctcaaacaggtcactgctgtcgggttaaaacccggcagcggattgtgctaactccgacgggagcaaatccgtgaaagatttattaaagtttctgaaagcgcagactaaaaccgaagagtttgatgcgatcaaaattgctctggctagcccagacatgatccgtagttggtctttcggtgaagttaaaaagccggaaaccatcaactaccgtacgttcaaaccagaacgtgacggccttttctgcgcccgtatctttgggccggtaaaagattacgagtgcctgtgcggtaagtacaagcgcctgaaacaccgtggcgtcatctgtgagaagtgcggcgttgaagtgacccagactaaagtacgccgtgagcgtatgggccacatcgaactggcttccccgactgcgcacatctggttcctgaaaagcctgccgtcccgtatcggtctgctgctcgatatgccgctgcgcgatatcgaacgcgtactgtactttgaatcctatgtggttatcgaaggcggtatgaccaacctggaacgtcagcagatcctgactgaagagcagtatctggacgcgctggaagagttcggtgacgaattcgacgcgaagatgggggcggaagcaatccaggctctgctgaagagcatggatctggagcaagagtgcgaacagctgcgtgaagagctgaacgaaaccaactccgaaaccaagcgtaaaaagctgaccaagcgtatcaaactgctggaagcgttcgttcagtctggtaacaaaccagagtggatgatcctgaccgttctgccggtactgccgccagatctgcgtccgctggttccgctggatggtggtcgtttcgcgacttctgacctgaacgatctgtatcgtcgcgtcattaaccgtaacaaccgtctgaaacgtctgctggatctggctgcgccggacatcatcgtacgtaacgaaaaacgtatgctgcaggaagcggtagacgccctgctggataacggtcgtcgcggtcgtgcgatcaccggttctaacaagcgtcctctgaaatctttggccgacatgatcaaaggtaaacagggtcgtttccgtcagaacctgctcggtaagcgtgttgactactccggtcgttctgtaatcaccgtaggtccatacctgcgtctgcatcagtgcggtctgccgaagaaaatggcactggagctgttcaaaccgttcatctacggcaagctggaactgcgtggtcttgctaccaccattaaagctgcgaagaaaatggttgagcgcgaagaagctgtcgtttgggatatcctggacgaagttatccgcgaacacccggtactgctgaaccgtgcaccgactctgcaccgtctgggtatccaggcatttgaaccggtactgatcgaaggtaaagctatccagctgcacccgctggtttgtgcggcatataacgccgacttcgatggtgaccagatggctgttcacgtaccgctgacgctggaagcccagctggaagcgcgtgcgctgatgatgtctaccaacaacatcctgtccccggcgaacggcgaaccaatcatcgttccgtctcaggacgttgtactgggtctgtactacatgacccgtgactgtgttaacgccaaaggcgaaggcatggtgctgactggcccgaaagaagcagaacgtctgtatcgctctggtctggcttctctgcatgcgcgcgttaaagtgcgtatcaccgagtatgaaaaagatgctaacggtgaattagtagcgaaaaccagcctgaaagacacgactgttggccgtgccattctgtggatgattgtaccgaaaggtctgccttactccatcgtcaaccaggcgctgggtaaaaaagcaatctccaaaatgctgaacacctgctaccgcattctcggtctgaaaccgaccgttatttttgcggaccagatcatgtacaccggcttcgcctatgcagcgcgttctggtgcatctgttggtatcgatgacatggtcatcccggagaagaaacacgaaatcatctccgaggcagaagcagaagttgctgaaattcaggagcagttccagtctggtctggtaactgcgggcgaacgctacaacaaagttatcgatatctgggctgcggcgaacgatcgtgtatccaaagcgatgatggataacctgcaaactgaaaccgtgattaaccgtgacggtcaggaagagaagcaggtttccttcaacagcatctacatgatggccgactccggtgcgcgtggttctgcggcacagattcgtcagcttgctggtatgcgtggtctgatggcgaagccggatggctccatcatcgaaacgccaatcaccgcgaacttccgtgaaggtctgaacgtactccagtacttcatctccacccacggtgctcgtaaaggtctggcggataccgcactgaaaactgcgaactccggttacctgactcgtcgtctggttgacgtggcgcaggacctggtggttaccgaagacgattgtggtacccatgaaggtatcatgatgactccggttatcgagggtggtgacgttaaagagccgctgcgcgatcgcgtactgggtcgtgtaactgctgaagacgttctgaagccgggtactgctgatatcctcgttccgcgcaacacgctgctgcacgaacagtggtgtgacctgctggaagagaactctgtcgacgcggttaaagtacgttctgttgtatcttgtgacaccgactttggtgtatgtgcgcactgctacggtcgtgacctggcgcgtggccacatcatcaacaagggtgaagcaatcggtgttatcgcggcacagtccatcggtgaaccgggtacacagctgaccatgcgtacgttccacatcggtggtgcggcatctcgtgcggctgctgaatccagcatccaagtgaaaaacaaaggtagcatcaagctcagcaacgtgaagagcgttgtgaactccagcggtaaactggttatcacttcccgtaatactgaactgaaactgatcgacgaattcggtcgtactaaagaaagctacaaagtaccttacggtgcggtactggcgaaaggcgatggcgaacaggttgctggcggcgaaaccgttgcaaactgggacccgcacaccatgccggttatcaccgaagtaagcggttttgtacgctttactgacatgatcgacggccagaccattacgcgtcagaccgacgaactgaccggtctgtctagcctggtggttctggattccgcagaacgtaccgcaggtggtaaagatctgcgtccggcactgaaaatcgttgatgctcagggtaacgacgttctgatcccaggtaccgatatgccagcgcagtacttcctgccgggtaaagcgattgttcagctggaagatggcgtacagatcagctctggtgacaccctggcgcgtattccgcaggaatccggcggtaccaaggacatcaccggtggtctgccgcgcgttgcggacctgttcgaagcacgtcgtccgaaagagccggcaatcctggctgaaatcagcggtatcgtttccttcggtaaagaaaccaaaggtaaacgtcgtctggttatcaccccggtagacggtagcgatccgtacgaagagatgattccgaaatggcgtcagctcaacgtgttcgaaggtgaacgtgtagaacgtggtgacgtaatttccgacggtccggaagcgccgcacgacattctgcgtctgcgtggtgttcatgctgttactcgttacatcgttaacgaagtacaggacgtataccgtctgcagggcgttaagattaacgataaacacatcgaagttatcgttcgtcagatgctgcgtaaagctaccatcgttaacgcgggtagctccgacttcctggaaggcgaacaggttgaatactctcgcgtcaagatcgcaaaccgcgaactggaagcgaacggcaaagtgggtgcaacttactcccgcgatctgctgggtatcaccaaagcgtctctggcaaccgagtccttcatctccgcggcaagcttccaggagaccactcgcgtgctgaccgaagcagccgttgcgggcaaacgcgacgaactgcgcggcctgaaagagaacgttatcgtgggtcgtctgatcccggcaggtaccggttacgcgtaccaccaggatcgtatgcgtcgccgtgctgcgggtgaagctccggctgcaccgcaggtgactgcagaagacgcatctgccagcctggcagaactgctgaacgcaggtctgggcggttctgataacgagtaatcgttaatccgcaaataacgtaaaaacccgcttcggcgggtttttttatggggggagtttagggaaagagcatttgtcagaatatttaaggaatttctgaatactcataatcaatgtagagatgactaatatcctgaaactgactgaactaattgagtcaaactcggcaaggattcgatactattcctgtgtaactttcttaaggaacgagaatgaaacaggaagtggaaaagtggcgaccttttggacatccggatggtgatattcgtgatttaagttttcttgatgctcatcaggctgtctacgttcagcatcatgagggcaaagagcctttagagtatcgcttttgggttacctactctcttcactgcttcacaaaagattatgaacatcagacgaacgaagaaaaacaaagcttaatgtaccacgcgcctaaagaatctcgtcccttctgccagcaccgttataacttagcgcgcacacacttaaaaagaactattttggcgctgccagaaagcaacgttattcatgccgggtatggtagctatgccgtgattgaggtggacttagacggaggagataaggcattttactttgttgcgttcagggctttcagggaaaagaaaaaactccgtttgcatgtaactagcgcttatcccatttctgaaaaacagaaaggtaaaagtgtgaaatttttcaccattgcctacaacttattgagaaataagcagcttcctcagcccagtaaataacaaaacccaccttaaggtgggtttcgccagagaattatctctggtattcagaacgccattaccggactttgccttgaccttgcgataatcgcaggttgcgggatgtctgaatttcttcagtctgctgcatcctggaagatgagaacatgtgttcttattttcgtctctatcatagttgagtatttactctcttacaatcagatctctttcattgctcaacaggcgatggcttcagactttgcattacggaatttttaagaaaggcagggcgaaacgaggaagaagcttttcgccctggacaacattcctgctgacggcactaccataaaaaaacacaacgctttcaacaaccttgcgtttttcatcttccgtagcggctcggaataaatttacgttcttacattccgtctcatagtctttggctggcgcgtcccagatagctgtcccagtctttccataccggctgcaaaccctgagcggttaacgcggcagcaaccgcttccggtctgcgatcgtcgtgcggactgaactgttccaactcggggtgattatcggcatagccacctggctgcgttttgctgaaggcgctgacgttattgatcgccagcggaataacgcgatcgcgaaaccacggactttcccgcgtggagagactcagttcaatctccggtgcaagcagtcggaaggcgcagatggtttgcactaactggcgttcatccataatgctcgcaggctcaatgccgccagtacacgggcgcaggcgcggaaaggagacagagtaacggctttgccagtaatgctgttgcagccatagcaaatgttcggcaaccatatagctgtcaacgcgccagttgtcggaaaggccaattagcgcgccgaggcctatcttatcaatccccgcacgccccagccgatccggcgtttccagccgccagaagaagtcctgttttttgcctttcagatgatggcgggcataagtcgcctcgtgatatgtctcctgataaaccatcacgccatccagaccaagttgctttaactcggcgtattccgtctccgccagcggttgcacttccatctgtagactagagaactgttcacgaagggcagggagatgacgacgaaagtaatccatccccactttcgcctgatgttcaccagtgactaacagcagatgttcaaagcccatctcccgtatagcggcactttccctggcaatatccgcttcatccagcgttttgcgcttgatgcgattactcatggaaaatccacagtacgtgcagtcgttagcgcaaagattggaaagataaagcgggacgtagaaactaactgtgttgccaaatcgctgacgggtcagacgctgcgcccgttgggccagttgttccagatagccactggcggcagggcttaacagcgccatcatgtcgtcgcgggtgagttggctggcatttagcgcccgctctacgtcagcagccgttttgccgttgatacgcaggcggatgtcgtcccagtccagttgtcgccagcgatcgctgaaggttttcatgcgcttgcctccagaaatccggtcagcgggctggtggcatgagcaaaataactgcggctgcccggtccggactgacgtgccagtaggcctgcttctaccgccagacgaaatgccttcgccatgttgacgggatcgtccgcgacggcaatcgccgtattcactaacaccgcgtcggcccccatttccagcgcctgcgcggcatggctgggaacgccgatgccagcatcgacaaccaccggcactgtggcctgctggataataatctccagcatggcgcgggtttccagtccctgattgctgccaatcggcgcgccgagcggcatcaccgctgcacagccgacttcttccagacgtttacacaataccggatcggccccgcagtaaggcagcacgacaaatccctgttgtaccagcgtttcggcggctttcagggtttcgatgggatcgggcaacagccagcgggcgtcagggtgaatctctaattttaaccagtttgtgcctaacgcttcacgagccagatgggcggcgaaaatggcttcttccgctgttttcgccccggatgtatttggcagcagggtcacacccgccgcgataagcggttcgaggatagcgtcgttgtgctggcgcaagtcgacacgtttcatcgccagtgtcaccagctggctgccggaagcgcggatcgcctccaccatcagttgactagaagcgaatttccctgtgccggtaaacagatgactatcaaacgttttgtccgcaatacgtaacatttcaaccccctgcaataacctgaaaaagcaggatctggtcgccatcctgcacgatatgttgcgcccactgctcacgcgggacgatttgctgattaatcgccagagccgcgcccgcttgtcgttggtcgagttgctccagtagttcgtgaacagtttgcccggcggcgcactgcatcgcttgatcgttaaacaggatctgcattgcttcctccgcataccgggcaaccactggcgcggcgcaacgccaggctgcgccactggctgcttttaccgtcgaacagtcggagttctcccgcaggtgtctctataccgcttaataacttaatggcttccagtgcctgcaaagtgcccataaccccgaccaccgggccaaccacgcccgccgtgcggcagttgcgttctggctcctggttatctggccacaggcagcggtaacacccctgctcccagggcggcgtcagtaccatcaactgaccgccaaatccgaccgcgctggcggtgataagcggcgtgttgagtgccacgcaggcggcattaatctcctggcgagtcgccatattgtcggtacagtcgagcaccacatcggcccgtgcaaccgcatcttttaacgcctcacccgttaaccgttgttgtaatgctgtcagttgaatgtcgggattcaactgtgtcagtcgctgttggctgacctggcttttcgggcgatcgatatcttcagtggtaaagaggatttgtcgttgcagattgcttaaatgcacatcgtcgtcatctgccagtaccagcgtcccgacgccagcgcccgccaggtacagcgcagcaggtgtacccagcccgcccagaccgataatcagcacctggctgtcgagcagtttttgctgcccgtccagagcgatatcgtcgagcaggatttggcggctataacgcataaagtcacggtcattcatcgccaactcctgcaatttccagcaactgtgccgttgccaaacgccagtctgcggcttgagtaatggcgctgacgacggcgatactgccgacacccgttgctatcaccgcaggcgcgcgtgccagactgataccgccaatcgccacggtgggataatccgccagtcgctcaacatgccgtgccagctgttccagcccctgcggtgcagaaggcatctgtttggtttgcgtcgggaacacatgtcccagcgcgatataagaggggcgtgctgccagcgcgacgtcgatttccatatcgtcatgtgtgctaacgcccagccgcaggcctgccgcgcggatggcattgagatcggtggcttgcaaatcttcctgccccaaatggacgccatacgcctgatgcttgatcgccagccgccagtaatcgttgataaacaatcgcgcgttatagcggcggcccagcgcaattgccgccacgacatcggcttccacctcttcatcgcgccgatctttgatgcgtagctggagagtacgtacgcctgcatccaacagacgttcgatccactgtacgctgtccaccaccgggtacagtccactacgaaaaggtacaggaggaaaatcaggctgatacatcacgcttcctccttacgcaggtagatttctccgcctctggcacggaagttctcgctcatatccgccattcccatttcaatagtttgcgtggcggcgtaatcacgcacttcctggctgattttcatgctgcagaatttcggcccacacatggagcaaaaatgggcgactttaccactctcttgcggcagggtttcatcgtgataagcgcgggcggtaaacgggtcgagggccagattaaactggtcttcccagcgaaattcgaagcgggctttgctcatggcgttatcgcgaatttgcgcgcccggatgccctttcgccaggtcagcggcgtgggcagcaatcttataggtgataagcccctgcttaacatcttctttattgggcagacccagatgctcttttggcgttacgtaacagagcatcgcgcagccaaaccagccaatcatcgccgcaccaatcccgctcgtgaagtggtcatagcccggcgcaatatcggtagttagcggccccagagtgtaaaacggcgcttcgtggcagtgctctaactcctcggtcatattgcggcggatcatctgcatcggcacgtggcctgggccttcaatcatcacctgcacgtcatattcccaggcaattttggtcagttcgcccagcgtatgcagctcggcaaactgcgcttcatcgttggcgtcctgaatagaaccggggcgcagaccgtcgcccaggctcaggctaacgtcataagcggcacagatttcacaaatttcgcggaagtgttgatagaggaaattttcctgatgatgggagaggcaccatttcgccataatgctaccgccgcgagagacgataccggtcaggcgtttcgcggtcatcggcacatagcgcagcagtacgcccgcatggatagtgaagtaatccacaccttgctcggcctgttccagcagcgtgtcgcggaacgcttcccaggtaagatcttcggcgatcccgttaaccttctccagcgcctggtagatcggcactgtaccgatcggcaccgggctgttacgcaaaatccactcgcgggtttcgtgaatatagcgaccggtggagagatccatcaccgtatccgctccccagcgcgtggaccataccagcttttccacttcttcttcgatggaagaggtgaccgcgctgttgccgatattggcgttaacttttaccaggaaattgcgaccaataatcatcggctcgctttccggatgattaatgttggccgggataatcgcacgtccggcagcaacttcatcacggacaaattccgcagtgatattttccggcagatgtgcgccaaagctcattcccggatgctggtggcgtaaaacctcgctacggatgcgctcgcggcccatattctcgcggatggcgatgaattccatttccggcgtgatgatgccctggcgggcgtagtgcagttgggtgacacggcgtcctgctttggcgcgttttggtgttagtacgccgctaaaacgcagttcgtcgaggccatcatctgccagccgcgctttagtgtaatcggaactgcgcacggtaagttcttcggtatcgccgcgcgcatcgatccacggctggcgtagttttgccagcccttgctgcacgttaatggcaatctgcggatcaccatacgggccggaggtgtcgtagaccggaatcgcttcgttttcttcgtactgcggctgttctttgctaccgccaattagcgtcgggctaagctggatctcacgcatcggcacgcgcacgccggggtgtgtgccagtgatataaatgcgtttactgttgggaaaggcggtgccttccagggtgtcgataaaatgttgggcccgggcgcgttgttcgcggcgggtcagttttgttgcagacatagctcattccaaaaagttaaggacgtggcttgtcagacgacggatgaagcaagagacgatcgccgcaggggcgatgcgatagcagattaactcttgttcccttcgcaggtattagcctgatcaggttccgcggatcccgaataaacggtctcagccagttaaggcactccgacaagaaattagccccgcaaatggggcattgaatgtaaattacgcgttaacagcgcagaactcaagcaggatgtttgacgcgggcggcgtcaagcaccagcagaatcagcttatcttccagcacaaagcgcgcttccagcgcctcgccgatgtcagataaaacctgttgaaactcaaggtaattatcatgatcgatggcggtttccagactggaatcgtagtaatccataatctgttgagtattggcttcgagttgcggccaaatcttcgcggcgcgcgcgagttgcccgttgccttccagcttatgaagaatgcgctcataaatactgaaatgtccggcagacaagtaatcgaccaggctctgacaaaaatcatcaagggctttttcgtttagcctcatgtagctttctttgccaggcttaatgccaaccagattgtagtaagccacgagcagatgcttacgtacatgtagccagcgatcaaccagtttgttacttcctctgacgcgctccgtcaggttatcgagctggttaagcatgattgactccgcaagtttgtattcaaaaactgctcagtgagaaatgtaaaaaccatgttaaacatgccagtgatgcaaaggtagtgcaagagctatggatcgtataattgaaaaattagatcacggctggtgggtcgtcagccatgaacaaaaattatggttgccgaagggagaattgccatatggcgaagcggcaaatttcgatcttgtgggtcagcgcgcactacaaatcggcgaatggcagggggaacctgtttggttagtacaacagcagcggcgtcacgatatggggagcgtacgtcaggtcattgatctcgatgttgggctgtttcaactggccggacgaggcgtacaactggcggagttttaccgaagccataaatactgtggttactgcgggcatgaaatgtatccgagcaaaaccgaatgggcgatgctgtgcagccattgccgtgagcgttactacccgcaaatcgccccctgcattattgttgccatccgtcgcgatgatagcatcctcctcgcccagcatacccgccatcgtaacggtgtccatacagtacttgccggattcgtcgaagtgggcgaaaccctcgagcaggcagtcgcgcgggaagtgatggaagagagcggaattaaagttaaaaacttgcgttacgtgacttctcagccgtggccgtttcctcagtctttaatgaccgcgtttatggcggaatatgacagcggcgacatcgtgatcgacccgaaagaattgctcgaggcgaactggtatcgctatgacgatttgccgttactcccgccgcccggcaccgtagcgcgccgtctgatagaagatacggtggcgatgtgtcgggcagagtatgagtgatgatacactgaccgcctgacgcactaaggaacagccaaaatgaccgaacttaaaaacgatcgttatctgcgggcgctgctgcgccagcccgttgatgtcactccagtatggatgatgcgccaggcgggtcgctatctaccggaatataaagccacgcgcgcccaggcaggcgattttatgagcctgtgcaaaaacgccgagctggcgtgcgaagtgactttgcaaccgctgcgtcgctacccgctggatgcggcgatcctcttttccgatatcctcaccgtgccggacgcgatggggttagggctctattttgaagccggagaaggtccgcgttttaccagcccagtcacctgcaaagctgacgtcgataaactgccaattccggacccggaagatgaactgggttacgtgatgaacgcggtgcgtaccattcgtcgcgaactgaaaggcgaagtgccgctgattggtttttccggcagcccgtggacgctggcgacctacatggtggaaggcggcagcagcaaagccttcaccgtgatcaaaaaaatgatgtatgccgatccgcaggcgctgcacgctctgctcgataaactggcgaaaagcgtcactttgtatctgaatgcgcagattaaagccggtgctcaggcagtgatgattttcgacacctggggcggcgtgcttaccgggcgcgattatcaacagttcagcctctattacatgcataaaattgttgatggtttactgcgtgaaaacgacggtcgccgcgtaccggtcacgctgtttaccaaaggcggcggacagtggctggaagccatggcagaaaccggttgcgatgcgctgggcctcgactggacaacggacatcgccgatgcgcgccgccgtgtgggcaataaagtcgcgttgcagggtaatatggatccgagcatgctgtacgcgccgcctgcccgcattgaagaagaagtagcgactatacttgcaggtttcggtcacggcgaaggtcatgtctttaaccttggtcacggcattcatcaggatgtgccgccagaacatgctggcgtgttcgtggaggcagtgcatcgactgtctgaacagtatcaccgctaaggagtgattatggatctcgcgagtttacgcgctcaacaaatcgaactggcttcttctgtgatccgcgaggatcgactcgataaagatccaccggatctgatcgccggagccgatgtcgggtttgagcagggcggagaagtgacgcgagcggcgatggtgctgctgaaatatcccagccttgagctggtcgagtataaagttgcccgcatcgccaccaccatgccttacattccaggttttctttccttccgcgaatatcctgcgctgctggcagcgtgggagatgctgagccaaaagccggatttagtgtttgtcgatggtcatgggatcagccatcctcgccgtcttggcgtcgccagccattttggcttattggtggatgtgccgaccattggcgtggcgaaaaaacggctctgcggtaaattcgaaccgctctccagcgaaccgggcgcgctggccccactgatggataaaggcgagcagctggcctgggtctggcgcagcaaagcgcgctgtaacccgttgtttatcgctaccggccatcgggtcagcgtggacagcgcgctggcgtgggtacaacgctgcatgaaaggctatcgtctgccggagccaacgcgctgggcggacgcggtggccagcgaacgtccggcgttcgtgcgctatacagcaaatcagccctaattcaggtaaactgcggataatttccgtatttgagaactcaacatgttacaaaacccaattcatctgcgtctggagcgcctggaaagctggcagcatgtcactttcatggcttgcttatgcgaacgcatgtaccccaattacgccatgttctgccagcaaaccggttttggtgatgggcaaatttaccgtcgcattctcgatctcatctgggaaacgctgaccgttaaagacgcaaaagtaaatttcgacagccaactggagaaatttgaagaagcgattcctagtgccgacgatttcgatctgtacggcgtttatccggcaatcgatgcctgcgtggcgttaagtgaactggtccatagccgtttgagtggtgaaacgctcgaacacgcggtggaagtgagtaagacctccatcacgaccgttgcgatgctggaaatgactcaggctggtcgcgaaatgagcgatgaagagcttaaagaaaacccagctgtagagcaagaatgggacattcagtgggaaatattccgacttttagctgagtgcgaagaacgcgatatcgagctgataaaaggccttagggcagacctgcgtgaggcgggtgagagcaatattggtataatttttcagcaataagaccagaaaacgtgatttaacgcctgatttgtcgtacctggagtcttccctttcgcccccgtctggtctacatttggggggcgaaaaaaagtggctatcggtgcgtgtatgcaggagagtgctattctggcatttccgtcgcactcgatgcttagcaagcgataaacacattgtaaggataacttatgaacaagactcaactgattgatgtaattgcagagaaagcagaactgtccaaaacccaggctaaagctgctctggagtccactctggctgcaattactgagtctctgaaagaaggcgatgctgtacaactggttggtttcggtaccttcaaagtgaaccaccgcgctgagcgtactggccgcaacccgcagaccggtaaagaaatcaaaattgccgcagctaacgtaccggcatttgtttctggcaaggcactgaaagacgcagttaagtaagattgcgtggcagtgaacagttttaacgaaggggtggttagtccccttttgtctttctggcgtcgaagtttgatgctggctggcgctctgcttctcactgcctgtagtcataactctagtcttcctccctttaccgccagtggatttgctgaagaccagggcgcggtacgcatctggcgaaaagacagcggcgataatgtgcatctgcttgccgtgtttagcccgtggcgcagtggcgataccacgacgcgagagtatcgctggcagggcgataacctcacgctcatcaatatcaatgtttacagcaaaccgccggtgaatattcgcgcgcgttttgacgatcgcggtgatctgagctttatgcaacgtgaatccgatggggaaaagcagcagctttctaacgaccaaatcgatttataccgttatcgtgctgatcagatccgccagattagcgatgccttacgtcaggggagagtcgtgctgcgccaggggcgctggcatgcgatggaacagaccgtgaccacctgcgaagggcaaaccattaaacctgatttagatagccaggcgatagcgcatatcgagcgccgccagagccgctcttctgttgatgtcagcgtggcatggctggaagcgcccgaaggtagccaattactgttagtggcaaactctgatttctgtcgctggcaacccaacgagaaaacgttctgatttaccagtggcccatacccatatgaccgccaccaccgcagccgccgtagcccatgcccattccggctccgcgcggaatacccgcttcagccatcgcgatatctcgtttcacccgtaactcatctaagctctgacgcaaattctccatctctttggcgaccgcgttaattttgctgctatccggtgggttcgcggctaacagggcattgtattcataacgcttcgtcaccagttgctgttgcagtgcgctgctttgagcgtaaaagtcattatggattttctgccacgctgtctgttgttcgctggtcaaaggcgcggcattttgctgccacataccgtgtccgccgtgagcaaatgcagatgtgcttcccatcgccattgcactaagcgccatcattaccagggcaattttcgtgttccgtttcatggttaatcctccagtggttgtcttacttcgggtattgcatcttccgtgccaacgatgaaacgctgatatgacgggtaatctggcatgataaacgagtaaaaatgactcgcctgctgcgggtagcgagtcatttttactcattgaaacttaagcctttgtgttacagcgcagggtaagcgctgataaaagatggcatgatttctgctgtcagaaagggatgagcaggcaaagaagaagatgcgttttatgcaacgttctaaagactccttagctaaatggttaagcgcgatcctccccgtggtcattgttgggctggtgggattgtttgcggtaactgtgattcgtgattatgggcgggcaagcgaggcagaccgccaggcattactggaaaaaggtaatgtgcttatccgcgctctggagagcggaagccgcgtagggatggggatgcgaatgcaccatgtacagcaacaggcgcttctggaagagatggcgggacagccgggagtgttgtggttcgcagtcaccgatgcgcagggcatcattattcttcatagcgaccccgataaggtcgggcgtgcgctctatagcccggatgaaatgcagaaattaaagccagaggaaaactcccgctggcggctgcttgggaaaacggaaactacgcctgcacttgaggtctatcgtttgttccagccaatgagtgcgccctggcggcatggaatgcacaatatgccgcgctgtaacggcaaagctgtgccacaagtagatgcacaacaggctatttttatcgccgttgatgccagtgatctggttgcaacccagagtggggaaaagcgcaataccctgattatcctcttcgccctggcgacggtcttgctggcaagcgtattgagtttcttctggtatcgccgctatctgcgcagccgccagcttctacaagatgaaatgaagcgcaaagagaagctggtggcgctggggcatcttgcggcaggcgttgcccacgaaatccgtaacccactttccagcattaaaggactggcgaaatactttgccgagcgcgcgcctgcagggggagaagcgcatcaactggcgcaggtgatggcgaaagaggccgaccgtttaaaccgcgtggtaagcgagttgctggaactggttaagccaacgcatctggctttgcaggcggtggatctcaacacgctgattaaccacagtttacagctggtaagtcaggatgcaaacagccgggagatccagttacgctttaccgccaacgacacattaccggaaattcaggccgacccggacaggctgactcaggtcctgttgaatctctatctcaatgctattcaggcgattggtcagcatggcgtgattagcgtgacggccagcgaaagcggcgcgggcgtgaaaatcagcgttaccgacagcggtaagggaattgcggcagatcagcttgatgccatcttcactccgtacttcaccactaaagccgaaggcaccggattggggctggcggtcgtgcataatattgttgaacaacacggtggtacaattcaggtcgcaagccaggagggaaaaggcagtacgttcaccctctggcttccggtcaatattacgcgtaaggacccacaaggatgacgcacgataatatcgatattctggtggtggatgatgacattagccactgcactattttgcaggctttactgcgcggctggggctataacgtcgcgctggcgaacagcgggcgacaggcgttggagcaggtgcgggaacaggtttttgatcttgtgctttgcgatgtgcgaatggcggagatggacggcatcgccacgctgaaagagatcaaagcgttaaacccggcaattccggtgctgattatgactgcgtactccagcgtcgagacggcggtagaggcactgaaaactggggcgctggattatctcatcaagccgctggatttcgataacctacaggcgacgctggaaaaagcgctcgcgcatacgcacagtattgatgctgaaacacctgcggtgactgccagccagttcggtatggtcggtaaaagcccggcgatgcaacacctgctcagtgaaatcgccctcgtcgcgccaagcgaagccacggtactgatccacggcgattccggcaccggtaaagagctggtcgccagggcgattcacgccagtagcgcacgtagcgaaaaaccgctggtaacgctcaactgtgcggcactcaacgaatccttgctggaatctgaattgttcggtcacgaaaaaggggcgtttactggagccgataaacgccgggaagggcgctttgttgaggcggacggcggcacgctgtttctcgatgaaattggcgatatcagcccgatgatgcaggtgcgtctgctgcgtgcgattcaggagcgcgaagttcagcgtgtcggtagcaaccagattatcagcgttgatgtccggctgattgcggcgacccatcgcgatcttgccgcagaggtgaatgccgggcgttttcgccaggatctctactatcgcctgaatgtggtggcgattgaagtaccaagcctgcggcaacggcgggaagatatccctctgctggctggccattttctgcagcgctttgccgagcgtaatcgcaaggcggtaaaaggttttacgccccaggcgatggatctgttgattcattacgactggccgggaaatattcgtgagctggaaaacgcggtggaacgggcagtggtgctgctgaccggggaatatatttccgaacgcgagctgccgctggcgattgccagtacgccgatcccgctgggacaaagtcaggatattcagccgttggtggaagtggaaaaagaggtgattctggcggcgctggagaaaacgggcggcaacaaaaccgaagccgcccgtcagttagggatcacgcgcaaaacgctattggcaaaactgagccgttaattctgctcgcgttcgatagcgcgccagccgatatctttccggcagaagcagtcgtcccagtggatatcggtcattaaggcataggcgcgtttctgcgcttctgccacggtatgacccagcgcggtgacgcacagtacgcgcccgccgttggtcactacctgctcgtcatccgccagttttgtgcccgcgtggaacactttgccgcctgccacttcttccagcggcaggccgtggatcacgtcaccggtgcggtaatcacccggatatccacccgcagccatcaccacgccgagagaagcgcgttcatcccactcggacgttttctcgtccagtttgctttcacaggccgccaggcagagctcaaccagatcggacttcatgcgcagcataatcggctgggtttccggatcgccaaagcggcagttaaattcaataaccttcggattgccctgtttgtcgatcatcaggcccgcgtagagaaaaccggtgtaggtgttgccttccgccgccatgcctttcacggttggccagataatacgttccatggtgcgctgatgaacgtcatcggttactaccggcgcgggggagtaagcgcccatcccgccggtgtttggtccggtatctttatcgcctacgcgtttgtgatcctggctggtagccatcggcagcacatgctcgccgtccaccatcacgataaagctcgcttcttcgccatcgaggaactcttcgataacgatgcgatgacccgcgtcgccaaaagcgttgcccgccagcatatcgtgaacagccgcttccgcttcttccagcgtcatcgccacgataacgcctttcccggcagccagaccgtccgctttaatgacgattggcgcgcctttctcacgcagatacgccagcgcaggttctacctcggtgaagttctggtattccgccgtagggatcttatggcgggccaggaaatctttggtaaacgctttactgccttccagttgggccgcacctgcggttgggccgaagattttcagcccggcggcgcggaaggtatcgaccacgcctttcaccagcggcgcttccgggccgacgatggtcagatcaatcttttcgttttgtgcgaaatccaacagcgccgggatatcggtcacgccaatagcaacgttttgcagcgcgggttccagtgcagtgcctgcattacccggagcaacaaaaacagtctcaaccagcgggctctgggccgctttccaggccagcgcgtgctcgcgcccgccgttaccaatcactaatactttcatctattgctccattaatggcggaagtggcgcatgtcggtgaagagcatcgcaataccgtgctcgtcggcggcggcaatcacttcgtcatcacggatagaaccgccaggctggattacgcaggtcacgcccgcagcggcggcggcatcaataccgtcgcggaacgggaagaacgcgtcagaagccatgctggaacctttcacttccaggccttcatcggccgctttaataccggcgatttttgcggagtacacgcggctcatctggcccgcgccaatgccgatagtcatattgtttttggcatagacgatagcgttggatttcacaaacttcgccaccttccagcagaacagcgcatcacgcagttcctgttcgctcggctgacgtttggtcaccacgcgcagttcttccgcaccgaccatccccaggtcacgatcctgaaccagcagaccgccgttcacgcgtttgaaatcgaggcccggaacacgctcgccccactgaccgcaggtcagaacgcgtacgttctgtttggcggcggtgattttcagggcttcttcgctggcggacggcgcaataatcacttcgacaaactgacgagaaatgatggcctgtgcggtttccgcatccagctcgcggttaaaggcaatgatgccgccgaatgcggaggttgggtcggttttgtacgcgcgatcgtaagcatcaagaatggaattgccgatagccacgccgcaagggttggcgtgcttcacaatcacacatgccggctcggcgaactctttcacgcactccagcgccgcatcggtatcggcgatgttgttataagagagggctttaccctgaacctgggttgcggtagcaacggaggcttctttcacattctcttctatatagaaggcagcctgctggtggctgttctcgccgtaacgcatatccagcttcttaatgaagttcaggttcagcgtgcgtgggaagcgaccggcggcttctttgctttcaccgtggtaagccggaaccatgctgccgaagtagttggcaatcatgctgtcgtaggcggcagtgtgttcgaaggctttgatggcgaggtcgaaacgggttgcaagcgtcaggcttccttcgttgtcatccatctctttaataatggcgtcatagtcgctgctcttcaccacgattgcgacatctttatggttcttggcggcggagcgcaccatcgttgggccgccgatatcgatgttctcaaccgcatcttccaggctgcaaccttcacgggccacggtctgggcgaacggatacaggttaacaaccaccatatcgataggctggatctgatgttcttccataatggcatcgtcctggccgcgacggcccagaatgccaccatgtactttcggatgcagggtcttcacgcgtccatccatcatctccgggaaaccggtgtaatcggaaacttcggttaccggcagacctttttctgctaacagacgggcagtgccccctgtagacagcagctccacaccgcgtgcggaaagtgcctgggcgaattcgacgataccggctttgtcagaaacactgagcagagcgcggcggactggacgacgttgttgcatggtaaatcccctggatttgactattacagagagcgttagctgaatttttcgcgaaaaactcagctaacgcccctaacggggcatccttatttttcgcccgcattgtaacgaaaacgtttgcgcaacgctcgcgaatttttctctttcaatggtgatcacaattttgactgtggttaccgtgggcaaaatacagaaattacattgatgattgtggataactctgtgcgtaaaaaggtataaagcgggcttttgctggggaatgcagcagtcagtcatttttctgcaatttttctattgcggcctgcggagaactccctataatgcgcctccatcgacacggcggatgtgaatcacttcacacaaacagccggttcggttgaagagaaaaatcctgaaattcagggttgactctgaaagaggaaagcgtaatatacgccacctcgcgacagtgcgctaaagcgcgtcgcaactgctctttaacaatttatcagacaatctgtgtgggcactcgaagatacggattcttaacgtcgcaagacgaaaaatgaataccaagtctcaagagtgaacacgtaattcattacgaagtttaattctttgagcatcaaacttttaaattgaagagtttgatcatggctcagattgaacgctggcggcaggcctaacacatgcaagtcgaacggtaacaggaagaagcttgcttctttgctgacgagtggcggacgggtgagtaatgtctgggaaactgcctgatggagggggataactactggaaacggtagctaataccgcataacgtcgcaagaccaaagagggggaccttcgggcctcttgccatcggatgtgcccagatgggattagctagtaggtggggtaacggctcacctaggcgacgatccctagctggtctgagaggatgaccagccacactggaactgagacacggtccagactcctacgggaggcagcagtggggaatattgcacaatgggcgcaagcctgatgcagccatgccgcgtgtatgaagaaggccttcgggttgtaaagtactttcagcggggaggaagggagtaaagttaatacctttgctcattgacgttacccgcagaagaagcaccggctaactccgtgccagcagccgcggtaatacggagggtgcaagcgttaatcggaattactgggcgtaaagcgcacgcaggcggtttgttaagtcagatgtgaaatccccgggctcaacctgggaactgcatctgatactggcaagcttgagtctcgtagaggggggtagaattccaggtgtagcggtgaaatgcgtagagatctggaggaataccggtggcgaaggcggccccctggacgaagactgacgctcaggtgcgaaagcgtggggagcaaacaggattagataccctggtagtccacgccgtaaacgatgtcgacttggaggttgtgcccttgaggcgtggcttccggagctaacgcgttaagtcgaccgcctggggagtacggccgcaaggttaaaactcaaatgaattgacgggggcccgcacaagcggtggagcatgtggtttaattcgatgcaacgcgaagaaccttacctggtcttgacatccacggaagttttcagagatgagaatgtgccttcgggaaccgtgagacaggtgctgcatggctgtcgtcagctcgtgttgtgaaatgttgggttaagtcccgcaacgagcgcaacccttatcctttgttgccagcggtccggccgggaactcaaaggagactgccagtgataaactggaggaaggtggggatgacgtcaagtcatcatggcccttacgaccagggctacacacgtgctacaatggcgcatacaaagagaagcgacctcgcgagagcaagcggacctcataaagtgcgtcgtagtccggattggagtctgcaactcgactccatgaagtcggaatcgctagtaatcgtggatcagaatgccacggtgaatacgttcccgggccttgtacacaccgcccgtcacaccatgggagtgggttgcaaaagaagtaggtagcttaaccttcgggagggcgcttaccactttgtgattcatgactggggtgaagtcgtaacaaggtaaccgtaggggaacctgcggttggatcacctccttaccttaaagaagcgttctttgcagtgctcacacagattgtctgatagaaagtgaaaagcaaggcgtcttgcgaagcagactgatacgtccccttcgtctagaggcccaggacaccgccctttcacggcggtaacaggggttcgaatcccctaggggacgccacttgctggtttgtgagtgaaagtcacctgccttaatatctcaaaactcatcttcgggtgatgtttgagatatttgctctttaaaaatctggatcaagctgaaaattgaaacactgaacaacgaaagttgttcgtgagtctctcaaattttcgcaacacgatgatgaatcgtaagaaacatcttcgggttgtgaggttaagcgactaagcgtacacggtggatgccctggcagtcagaggcgatgaaggacgtgctaatctgcgataagcgtcggtaaggtgatatgaaccgttataaccggcgatttccgaatggggaaacccagtgtgtttcgacacactatcattaactgaatccataggttaatgaggcgaaccgggggaactgaaacatctaagtaccccgaggaaaagaaatcaaccgagattcccccagtagcggcgagcgaacggggagcagcccagagcctgaatcagtgtgtgtgttagtggaagcgtctggaaaggcgcgcgatacagggtgacagccccgtacacaaaaatgcacatgctgtgagctcgatgagtagggcgggacacgtggtatcctgtctgaatatggggggaccatcctccaaggctaaatactcctgactgaccgatagtgaaccagtaccgtgagggaaaggcgaaaagaaccccggcgaggggagtgaaaaagaacctgaaaccgtgtacgtacaagcagtgggagcacgcttaggcgtgtgactgcgtaccttttgtataatgggtcagcgacttatattctgtagcaaggttaaccgaataggggagccgaagggaaaccgagtcttaactgggcgttaagttgcagggtatagacccgaaacccggtgatctagccatgggcaggttgaaggttgggtaacactaactggaggaccgaaccgactaatgttgaaaaattagcggatgacttgtggctgggggtgaaaggccaatcaaaccgggagatagctggttctccccgaaagctatttaggtagcgcctcgtgaattcatctccgggggtagagcactgtttcggcaagggggtcatcccgacttaccaacccgatgcaaactgcgaataccggagaatgttatcacgggagacacacggcgggtgctaacgtccgtcgtgaagagggaaacaacccagaccgccagctaaggtcccaaagtcatggttaagtgggaaacgatgtgggaaggcccagacagccaggatgttggcttagaagcagccatcatttaaagaaagcgtaatagctcactggtcgagtcggcctgcgcggaagatgtaacggggctaaaccatgcaccgaagctgcggcagcgacgcttatgcgttgttgggtaggggagcgttctgtaagcctgcgaaggtgtgctgtgaggcatgctggaggtatcagaagtgcgaatgctgacataagtaacgataaagcgggtgaaaagcccgctcgccggaagaccaagggttcctgtccaacgttaatcggggcagggtgagtcgacccctaaggcgaggccgaaaggcgtagtcgatgggaaacaggttaatattcctgtacttggtgttactgcgaaggggggacggagaaggctatgttggccgggcgacggttgtcccggtttaagcgtgtaggctggttttccaggcaaatccggaaaatcaaggctgaggcgtgatgacgaggcactacggtgctgaagcaacaaatgccctgcttccaggaaaagcctctaagcatcaggtaacatcaaatcgtaccccaaaccgacacaggtggtcaggtagagaataccaaggcgcttgagagaactcgggtgaaggaactaggcaaaatggtgccgtaacttcgggagaaggcacgctgatatgtaggtgaggtccctcgcggatggagctgaaatcagtcgaagataccagctggctgcaactgtttattaaaaacacagcactgtgcaaacacgaaagtggacgtatacggtgtgacgcctgcccggtgccggaaggttaattgatggggttagcgcaagcgaagctcttgatcgaagccccggtaaacggcggccgtaactataacggtcctaaggtagcgaaattccttgtcgggtaagttccgacctgcacgaatggcgtaatgatggccaggctgtctccacccgagactcagtgaaattgaactcgctgtgaagatgcagtgtacccgcggcaagacggaaagaccccgtgaacctttactatagcttgacactgaacattgagccttgatgtgtaggataggtgggaggctttgaagtgtggacgccagtctgcatggagccgaccttgaaataccaccctttaatgtttgatgttctaacgttgacccgtaatccgggttgcggacagtgtctggtgggtagtttgactggggcggtctcctcctaaagagtaacggaggagcacgaaggttggctaatcctggtcggacatcaggaggttagtgcaatggcataagccagcttgactgcgagcgtgacggcgcgagcaggtgcgaaagcaggtcatagtgatccggtggttctgaatggaagggccatcgctcaacggataaaaggtactccggggataacaggctgataccgcccaagagttcatatcgacggcggtgtttggcacctcgatgtcggctcatcacatcctggggctgaagtaggtcccaagggtatggctgttcgccatttaaagtggtacgcgagctgggtttagaacgtcgtgagacagttcggtccctatctgccgtgggcgctggagaactgaggggggctgctcctagtacgagaggaccggagtggacgcatcactggtgttcgggttgtcatgccaatggcactgcccggtagctaaatgcggaagagataagtgctgaaagcatctaagcacgaaacttgccccgagatgagttctccctgactccttgagagtcctgaaggaacgttgaagacgacgacgttgataggccgggtgtgtaagcgcagcgatgcgttgagctaaccggtactaatgaaccgtgaggcttaaccttacaacgccgaaggtgttttggcggattgagagaagattttcagcctgatacagattaaatcagaacgcagaagcggtctgataaaacagaatttgcctggcggcagtagcgcggtggtcccacctgaccccatgccgaactcagaagtgaaacgccgtagcgccgatggtagtgtggggtctccccatgcgagagtagggaactgccaggcatcaaattagaaaaaccccggtccataaggccggggttttttgcatatcaattatttgcatgatgaagggaatctcatgagtgttctgtatatccaaattcgtcgtaatcaaattactgttcgcgatcttgaaagcaaacgtgaagtgagtggagacgctgccttcagtaaccagcgcctgttaatcgccaatttctttgttgcagaaaaagttctgcaagatcttgttctgcaactccacccacgtagtacctggcattcttttttgccagcaaaacgtatggatattgttgtgagcgcactggaaatgaatgagggcggtttgagtcaggttgaggaacgcattctccatgaagtggtcgctggggcaacgttaatgaaatatcgccagttccacatccatgcgcaaagtgcggtactcagtgatagtgcggtcatggcaatgcttaagcagaaataatcgtgtcaccattggtgggtactaaacctgaagttcagcccaccgggatgagaaaaaatcgcttacgcccccacatacgccagattcagcaacggatacggtttccccaaatcgtccacctcagagcgtcccgtaaccttaaaacccaccttcttatagaacccaaccgcctgctcattttgctcattaacgttggttgtcagttccggtgccatgctgagcgcatgctccaccagcacccgacctacgccgcagccgcgcacatcaggatcgataaacagcgcatccatatgctgcccacttagcaacataaatccaaccggctgatcccgctcattaaccgcgacccacaacggcgcttccggcaggaaggaacgaactaggtcctccagctcggtccgatactctgcacttagaaaatcgtgagtggcatcgacagaacgacaccaaatcgcaacgagttcctccccttcctcatgccgactgcggcgaatactaataaccattttctctccttttagtcattcttatattctaacgtagtcttttccttgaaactttctcaccttcaacatgcaggctcgacattggcaaattttctggttatcttcagctatctggatgtctaaacgtataagcgtatgtagtgaggtaatcaggttatgccgattcgtgtgccggacgagctacccgccgtcaatttcttgcgtgaagaaaacgtctttgtgatgacaacttctcgtgcgtctggtcaggaaattcgtccacttaaggttctgatccttaacctgatgccgaagaagattgaaactgaaaatcagtttctgcgcctgcttagtaacagtcctttgcaggtcgatattcagctgttgcgcatcgattcccgtgaaagccgcaacacgcccgcagagcatctgaacaacttctactgtaactttgaagatattcaggatcagaactttgacggtttgattgtaactggtgcgccgctgggcctggtggagtttaatgatgtcgcttactggccgcagatcaaacaggtgctggagtggagcaaagatcacgtcaccagcacgctgtttgtctgctgggcggtacaggccgcgctcaatatcctctacggcattcctaagcaaactcgcaccgaaaaactctctggcgtttacgagcatcatattctccatcctcatgcgcttctgacgcgtggctttgatgatagtttcctggcaccgcatagccgctatgctgactttccggcagcgttgattcgtgattacaccgatctggaaattctggcagagacggaagaaggggatgcatatctgtttgccagtaaagataagcgcattgcctttgtgacgggccatcccgaatatgatgcgcaaacgctggcgcaggaatttttccgcgatgtggaagccggactagacccggatgtaccgtataactatttcccgcacaatgatccgcaaaatacaccgcgagcgagctggcgtagtcacggtaatttactgtttaccaactggctcaactattacgtctaccagatcacgccatacgatctacggcacatgaatccaacgctggattaatcttctgtgatagtcgatcgttaagcgattcagcaccttacctcaggcaccttcgggtgccttttttatttccgaaacgtacctcagcaggtgaataaattttattcatattgttatcaacaagttatcaagtatttttaattaaaatggaaattgtttttgattttgcattttaaatgagtagtcttagttgtgctgaacgaaaagagcacaacgatccttcgttcacagtggggaagttttcggatccatgacgaggagctgcacgatgactgaacaggcaacaacaaccgatgaactggctttcacaaggccgtatggcgagcaggagaagcaaattcttactgccgaagcggtagaatttctgactgagctggtgacgcattttacgccacaacgcaataaacttctggcagcgcgcattcagcagcagcaagatattgataacggaacgttgcctgattttattagcgaaacagcttccattcgcgatgctgattggaaaattcgcgggattcctgcggacttagaagaccgccgcgtagagataactggcccggtagagcgcaagatggtgatcaacgcgctcaacgccaatgtgaaagtctttatggccgatttcgaagatagtctggcaccagactggaacaaagtgatcgacgggcaaattaacctgcgtgatgcggttaacggcaccatcagttacaccaatgaagcaggcaaaatttaccagctcaagcccaatccagcggttttgatttgtcgggtacgcggtctgcacttgccggaaaaacatgtcacctggcgtggtgaggcaatccccggcagcctgtttgattttgcgctctatttcttccacaactatcaggcactgttggcaaagggcagtggtccctatttctatctgccgaaaacccagtcctggcaggaagcggcctggtggagcgaagtcttcagctatgcagaagatcgctttaatctgccgcgcggcaccatcaaggcgacgttgctgattgaaacgctgcccgccgtgttccagatggatgaaatccttcacgcgctgcgtgaccatattgttggtctgaactgcggtcgttgggattacatcttcagctatatcaaaacgttgaaaaactatcccgatcgcgtcctgccagacagacaggcagtgacgatggataaaccattcctgaatgcttacagtcgcctgttgattaaaacctgccataaacgcggtgcttttgcgatgggcggcatggcggcgtttattccgagcaaagatgaagagcacaataaccaggtgctcaacaaagtaaaagcggataaaagcctggaagccaataacggtcacgatggcacatggatcgctcacccaggccttgcggacacggcaatggcggtattcaacgacattctcggctcccgtaaaaatcagcttgaagtgatgcgcgaacaagacgcgccgattactgccgatcagctgctggcaccttgtgatggtgaacgcaccgaagaaggtatgcgcgccaacattcgcgtggctgtgcagtacatcgaagcgtggatctctggcaacggctgtgtgccgatttatggcctgatggaagatgcggcgacggctgaaatttcccgtaccagcatctggcagtggatccatcatcaaaaaacgttgagcaatggcaaaccggtgaccaaagccttgttccgccagatgctgggcgaagagatgaaagtcattgccagcgaactgggcgaagaacgtttctcccaggggcgttttgacgatgccgcacgcttgatggaacagatcaccacttccgatgagttaattgatttcctgaccctgccaggctaccgcctgttagcgtaaaccaccacataactatggagcatctgcacatgaaaacccgtacacaacaaattgaagaattacagaaagagtggactcaaccgcgttgggaaggcattactcgcccatacagtgcggaagatgtggtgaaattacgcggtagtgtcaatcctgaatgcacgctggcgcaactgggcgcagcgaaaatgtggcgtctgctgcacggtgagagcaaaaaaggctacatcaacagcctcggcgcactgactggcggtcaggcgctgcaacaggcgaaagcgggtattgaagcagtctatctgagcggatggcaggtagcggcggacgctaacctggcggccagcatgtatccggatcagagcctctatccggcaaacagcgtgccagctgtggtggagcggatcaacaacaccttccgtcgtgccgatcagatccaatggtccgcgggcattgagccgggcgatccgcgctatgtcgattacttcctgccgatcgttgccgatgcggaagccggttttggcggtgtcctgaatgcctttgaactgatgaaagcgatgattgaagccggtgcagcggcagttcacttcgaagatcagctggcgagtgtgaagaaatgcggtcacatgggcggcaaagttttagtgccaactcaggaagctattcagaaactggtcgcggcgcgtctggcagctgacgtgacgggcgttccaaccctgctggttgcccgtaccgatgctgatgcggcggatctgatcacctccgattgcgacccgtatgacagcgaatttattaccggcgagcgtaccagtgaaggcttcttccgtactcatgcgggcattgagcaagcgatcagccgtggcctggcgtatgcgccatatgctgacctggtctggtgtgaaacctccacgccggatctggaactggcgcgtcgctttgcacaagctatccacgcgaaatatccgggcaaactgctggcttataactgcagcccgagcttcaactggcagaaaaacctcgacgacaaaactattgccagcttccagcagcagctgagcgatatgggctacaagttccagttcatcaccctggcaggtatccacagcatgtggttcaacatgtttgacctggcaaacgcctatgcccagggcgagggtatgaagcactacgttgagaaagtgcagcagccggaatttgccgccgcgaaagatggctataccttcgtatctcaccagcaggaagtgggtacaggttacttcgataaagtgacgactattattcagggcggcacgtctagtgtcaccgcgctgaccggctccactgaagaaagccagttctaagcaacaacaaccgttgctgactgtaggccggataaggcgttcacgccgcatccggcaatcggtgcacgatgcctgatgcgacgcttgcgcgtcttatcatgcctacagccgttgccgaacgtaggctggataaggcgtttacgccgcatccggcaattctctgctcctgatgagggcgctaaatgccgcgtggcctggaattattgattgctcaaaccattttgcaaggcttcgatgctcagtatggtcgattcctcgaagtgacctccggtgcgcagcagcgtttcgaacaggccgactggcatgctgtccagcaggcgatgaaaaaccgtatccatctttacgatcatcacgttggtctggtcgtggagcaactgcgctgcattactaacggccaaagtacggacgcggcatttttactacgtgttaaagagcattacacccggctgttgccggattacccgcgcttcgagattgcggagagcttttttaactccgtgtactgtcggttatttgaccaccgcagccttactcccgagcggctttttatctttagctctcagccagagcgccgctttcgtaccattccccgcccgctggcgaaagactttcaccccgatcacggctgggaatctctactgatgcgcgttatcagcgacctaccgctgcgcctgcgctggcagaataaaagccgtgacatccattacattattcgccatctgacggaaacgctggggacagacaacctcgcggaaagtcatttacaggtggcgaacgaactgttttaccgcaataaagccgcctggctggtaggcaaactgatcacaccttccggcacattgccatttttgctgccgatccaccagacggacgacggcgagttatttattgatacctgcctgacgacgaccgccgaagcgagcattgtttttggctttgcgcgttcttattttatggtttatgcgccgctgcccgcagcgctggtcgagtggctacgggaaattctgccaggtaaaaccaccgctgaattgtatatggctatcggctgccagaagcacgccaaaaccgaaagctaccgcgaatatctcgtttatctacagggctgtaatgagcagttcattgaagcgccgggtattcgtggaatggtgatgttggtgtttacgctgccgggctttgatcgggtattcaaagtcatcaaagacaggttcgcgccgcagaaagagatgtctgccgctcacgttcgtgcctgctatcaactggtgaaagagcacgatcgcgtgggccgaatggcggacacccaggagtttgaaaactttgtgctggagaagcggcatatttccccggcattaatggaattactgcttcaggaagcagcggaaaaaatcaccgatctcggcgaacaaattgtgattcgccatctttatattgagcggcggatggtgccgctcaatatctggctggaacaagtggaaggtcagcagttgcgcgacgccattgaagaatacggtaacgctattcgccagcttgccgctgctaacattttccctggcgacatgctgtttaaaaacttcggtgtcacccgtcacgggcgtgtggttttttatgattacgatgaaatttgctacatgacggaagtgaatttccgcgacatcccgccgccgcgctatccggaagacgaacttgccagcgaaccgtggtacagcgtcagcccgggcgatgttttcccggaagagtttcgccactggctatgcgccgacccgcgtattggtccgctgtttgaagagatgcacgccgacctgttccgcgctgattactggcgcgcactacaaaaccgcatacgtgaagggcatgtggaagatgtttatgcgtatcggcgcaggcaaagatttagcgtacggtatggggagatgcttttttgagtaaagcttccatataatttttctccgcaatgtatcgagggttatccgtaaagccaaagctttcagccatcttatttaatgtattaaggattaattcagcaataacccggtgaccaaattcaaaagccaactcaaaggcagagtatttttgtggggctttgtgttgccaaaaatccataatatcttcagcggtaaatccaaacaggcgtgcatggtcagataaagcaagataaaccgtctctacaacattttgttgtttatgctgtatcgcactaaacaaaccgggatattcattagaattatttgccaggaggaggggcttcatattttttttatcgaatttaaacgtattaaacagagtgggtaatgcgttaaaaatagtattaataacgttcatgtgtccgcgctgcatggccataaacaaacccgtgtcgcgcgcaagacttttagcggtcagaagatctacaatatcggaagcactaatgttaatttcctgggctaggctgggcaatgcttcaagaataactttcacgatatcgctatgtccattttgcatcgccagatatagtcctgggcaaccataaaaatcctttgccttcaggagatcgagtacctgttctttagtcaaatgacatgtgcgaattaacaaaggtaacgcgttcaaaacaattttcagcatgtcggcatcaccattcgccataacatggtataaaacatggctggacgttctatttttggcactcaggaatttatacacttgttcgttatctaaatgatgtgttgcggccagtttaggtaaggcgttcagaatgctggttacaacatttttatccttacgacttatcgctaaaaataatccagaaaaaccatttttatcttttgcctccagaatatgcatgagattttttttgctgagtaatccttcatatcctgtttcactcaaactattgaaaatagtctcaacgatatccgcattaccataatttatagccaaatataaacctggcaggttaatactattataggcagtcaacatttctgttctatgtagttctggcattttctggagttgaatcatcagttgcgtaagttggtgattctgaccaattgccattagcaaattcatcgttgcaggacttaatggaggggttatttcatccacagatccttttaacatcaatagctgttctttcggaagtgctggaattattgcaacagattgattaataacatgatcattactccatttcaggaggctataatctacattcataaaatccatcagagaatagtgtttaatattctctttgctttcgctcataattcttattttatcgttagttacattaggatcataaacgctaaccacgtaatgggtacatccttcagttgtgttctttattcttagccggaccgtcaaagcatggttatccaccagtaatatggctgccataacactgatgccattactttccatcttgtcaaaatatgctttcataactagcccgaaatcaccgcaggcagcaacgcaacgcccctcaggacggctggaaaccaacgccaaagtctggtttttgcattttttgttgaagtgcgtgagaaatttttcagcactagagtaatcatcttgatggggtttgtaatcaacattctgataaatatcattaatatattgtgcagcaatgtgtcggcatactatacggttttggggtcgccccggaaaataacattgaccattaagtttaattcttgggaattctttttcttttctatcactttttaggtttaattcttgtttatcaagagtgtcactgcgttgaggtaaaatttccattaggtatttttcaaatattggggcaatggtttgagtaagtgtcgtgttttcgtttttattaattatcgtaatttctttcttatcagcttgtaagacggacgtggaaaatttaatgacaaaatccttgttgctaaagatatgacgaccattttgtctacagttctcactgaagctttttaatagaggcgtcgccagctccttgccagaaaatttatcctcgagttctttataaaacaattcactcagggtttggtgttcatttgtctgggctgtattattaatatttgcagagaaagaactacgaggaatacgagtaatcatttaaatatctcattgtttattgatgtcttgaattttaactatcagaacagtgaaaaaatttaatatgattacaactaaagaaatatcataaatcgctcaatctcataatgcagccgtaaaagtttcggtggaatgagatcttgcgattttgttaataattaagtggtttgatgtttaaaaataatgctgagttaataaaagtgtgtgaagtgtatgacattaagttattttggcgtcaatgcgattaacagacacccttattctattgccactcaggtatgatgggcagaatattgcctctgcccgccagaaaaagtcagcgcattccaccgtacgccagcgtcacttccttcgccgctttaatcaccatcgcgccaaactcggtcacgcggtcatcggtaatacgactaatcggtccggaaatagaaattgcggcaaacggttcacggtgctcatcgaaaatacacgctgcaaggcaacgtagccccagtgcatgttcctcatcgtcaaaactataaccccgtttgcgcgtttgggcgagatcttcttttaaatgcacaggagacaccagcgttgcgtgggtataggcatgtaaccctttgcggtgcagcagcttcgtcacctgttcttcgctcagttgggctaaaaaggctttacccgcaccggaagcgtgcatcggcaatttaccgccgataggcgcggacattcgcatcagatgcgtacactgtacctggtcgataataatcgcttcgtgatcgctttgatcaagcaccgccatattgaccgtttcgccagactcttccattagattgcgcaggatagggtgaacaatcgctaacaaattacggctctggagaaagctgctgccgaccataaaggcatgtgcgccgattgcccaatgtcccagttcgccaacctgacgcacgaaaccctgctgttgcatcgtggttagcaggcggtgggtcgtggaattgggtaacccggcttgttgcgccagttccgtgagtgccacactgccattggattcggcaatccactccagtaatttcaggccacgcgttaaagactgaacctgtccagtcgctggtgcggtggcaacggcgggttttctgccgcgtttcgcgggaatgggtgcgaccatgacagtctcttttttctgtatcgtggaaatcattttcatttttattgttagctaatgcaatagttactgaactgatccgatgagttaatgttgaacaaatctcatgttgcgtggtggtcgcttttaccacagatgcgtttatgccagtatggtttgttgaatttttattaaatctgggttgagcgtgtcgggagcaagtgtgagcagcaaagtggaacaactgcgtgcgcagttaaatgaacgtattctggtgctggacggcggtatgggcaccatgatccagagttatcgactgaacgaagccgattttcgtggtgaacgctttgccgactggccatgcgacctcaaaggcaacaacgacctgctggtactcagtaaaccggaagtgatcgccgctatccacaacgcctactttgaagcgggcgcggatatcatcgaaaccaacaccttcaactccacgaccattgcgatggcggattaccagatggaatccctgagcgcggaaatcaactttgcggcggcgaaactggcgcgagcttgtgctgacgagtggaccgcgcgcacgccagagaaaccgcgctacgttgccggtgttctcggcccgaccaaccgcacggcgtctatttctccggacgtcaacgatccggcatttcgtaatatcacttttgacgggctggtggcggcttatcgagagtccaccaaagcgctggtggaaggtggcgcggatctgatcctgattgaaaccgttttcgacacccttaacgccaaagcggcggtatttgcggtgaaaacggagtttgaagcgctgggcgttgagctgccgattatgatctccggcaccatcaccgacgcctccgggcgcacgctctccgggcagaccaccgaagcattttacaacagtttgcgccacgccgaagctctgacctttggcctgaactgtgcgctggggcccgatgaactgcgccagtacgtgcaggagctgagtcggattgcggaatgctacgtcaccgcgcacccgaacgccgggctacccaacgcctttggtgagtacgatctcgacgccgacacgatggcaaaacagatacgtgaatgggcgcaagcgggttttctcaatatcgtcggcggctgctgtggcaccacgccacaacatattgcagcgatgagtcgtgcagtagaaggattagcgccgcgcaaactgccggaaattcccgtagcctgccgtttgtccggcctggagccgctgaacattggcgaagatagcctgtttgtgaacgtgggtgaacgcaccaacgtcaccggttccgctaagttcaagcgcctgatcaaagaagagaaatacagcgaggcgctggatgtcgcgcgtcaacaggtggaaaacggcgcgcagattatcgatatcaacatggatgaagggatgctcgatgccgaagcggcgatggtgcgttttctcaatctgattgccggtgaaccggatatcgctcgcgtgccgattatgatcgactccagtaaatgggacgtcattgaaaaaggtctgaagtgtatccagggcaaaggcattgttaactctatcagcatgaaagagggcgtcgatgcctttatccatcacgcgaaattgttgcgtcgctacggtgcggcagtggtggtaatggcctttgacgaacagggacaggccgatactcgcgcacggaaaatcgagatttgccgtcgggcgtacaaaatcctcaccgaagaggttggcttcccgccagaagatatcatcttcgacccaaacatcttcgcggtcgcaactggcattgaagagcacaacaactacgcgcaggactttatcggcgcgtgtgaagacatcaaacgcgaactgccgcacgcgctgatttccggcggcgtatctaacgtttctttcagcttccgtggcaacgatccggtgcgcgaagccattcacgcagtgttcctctactacgctattcgcaatggcatggatatggggatcgtcaacgccgggcaactggcgatttacgacgacctacccgctgaactgcgcgacgcggtggaagatgtgattcttaatcgtcgcgacgatggcaccgagcgtttactggagcttgccgagaaatatcgcggcagcaaaaccgacgacaccgccaacgcccagcaggcggagtggcgcagctgggaagtgaataaacgtctggaatacagcctggtcaaaggcattaccgagtttatcgagcaggataccgaagaagcccgccagcaggctacgcgcccgattgaagtgattgaaggcccgttgatggacggcatgaatgtggtcggcgacctgtttggcgaagggaaaatgttcctgccacaggtggtcaaaagcgcgcgcgtcatgaaacaggcggtggcctacctcgaaccgtttattgaagccagcaaagagcagggcaaaaccaacggcaagatggtgatcgccaccgtgaagggcgacgtccacgacatcggtaaaaatatcgttggtgtggtgctgcaatgtaacaactacgaaattgtcgatctcggcgttatggtgcctgcggaaaaaattctccgtaccgctaaagaagtgaatgctgatctgattggccttagcgggcttatcacgccgagcctggacgagatggttaacgtggcgaaagagatggagcgtcagggcttcactattccgttactgattggcggcgcgacgaccagtaaagcgcacacggcggtgaaaatcgagcagaactacagcggcccgacggtgtatgtgcagaatgccagccgtaccgttggtgtggtggcggcgctgctttccgatacccagcgtgatgattttgtcgctcgtacccgcaaggagtacgaaaccgtacgtattcagcacgggcgcaagaaaccgcgcacaccaccggtcacgctggaagcggcgcgcgataacgatttcgcttttgactggcaggcttacacgccgccggtggcgcaccgtctcggcgtgcaggaagtcgaagccagcatcgaaacgctgcgtaattacatcgactggacaccgttctttatgacctggagcctggccgggaagtatccgcgcattctggaagatgaagtggtgggcgttgaggcgcagcggctgtttaaagacgccaacgacatgctggataaattaagcgccgagaaaacgctgaatccgcgtggcgtggtgggcctgttcccggcaaaccgtgtgggcgatgacattgaaatctaccgtgacgaaacgcgtacccatgtgatcaacgtcagccaccatctgcgtcaacagaccgaaaaaacaggcttcgctaactactgtctcgctgacttcgttgcgccgaagctttctggtaaagcagattacatcggcgcatttgccgtgactggcgggctggaagaggacgcactggctgatgcctttgaagcgcagcacgatgattacaacaaaatcatggtgaaagcgcttgccgaccgtttagccgaagcctttgcggagtatctccatgagcgtgtgcgtaaagtctactggggctatgcgccgaacgagaacctcagcaacgaagagctgatccgcgaaaactaccagggcatccgtccggcaccgggctatccggcctgcccggaacatacggaaaaagccaccatctgggagctgctggaagtggaaaaacacactggcatgaaactcacagaatctttcgccatgtggcccggtgcaagcgttagcggttggtacttcagccacccggacagcaagtactacgctgtagcacaaattcagcgcgatcaggttgaagattatgcccgccgtaaaggtatgagcgttaccgaagttgagcgctggctggcaccgaatctggggtatgacgcggactgattcacaaatctgtcacttttccttacaacaaacagggcgctcaatgagtgccctgtctctttattaatatgaaacacttatactggaaacaggctggaataatcttagccggaaaaacgaatgtcaaaaggcacagtaaagatgccagtcagcgtgtttccggtcctttggtcattcaattgcttcaggaacatataacgataaggagaacctgaactcgtgttaacgctgcttcacctgctttctgccgtcgccctgctggtctgggggactcatattgttcgaaccggcgtaatgcgcgtcttcggcgcgcgtttgcgtactgtccttagccggagcgtcgaaaaaaagccgctcgccttttgcgcggggatcggcgttaccgcactggtacagagcagtaatgccaccaccatgctggtgaccagctttgtcgctcaggatctggtagccctcgcaccggctctggtcattgtgctgggtgcagatgtcgggacggcgctaatggcgcgtattctcaccttcgacttatcctggctgagtccgttacttatttttatcggcgtgatttttttcctcggacgcaaacagagtcgcgccgggcaactgggccgcgtcggtattggtcttgggctgattttgctagcgctggagttgattgtgcaggccgtaacgccgatcacccaggcaaacggcgttcaggtgatctttgccagcctgaccggcgatattctgctggatgcgctgattggcgcgatgttcgccattatcagctactccagccttgctgctgtactgctgaccgcgactctgaccgccgcaggcattatctccttccccgtggcgctctgtctggtgattggtgctaacctcggttccggtctgctggcaatgctcaacaacagtgccgccaatgccgcagcccgccgtgtcgcgctgggtagtctgctgtttaagctggtgggtagcctgattatcctgccgtttgtccatttgctggcagagacaatggggaagttgagtttgccaaaagcggaactggtgatctatttccacgtcttctacaaccttgtacgttgcctggtcatgctgccatttgttgacccgatggcacggttttgcaaaacgattattcgcgatgaaccggaactggatacccagctacggcctaaacatctggatgtcagcgcgctggatacgcccacgcttgctctggcgaacgccgcgcgcgaaaccctgcgcattggcgacgccatggaacagatgatggaagggttgaataaagtgatgcacggtgagccacggcaggagaaagagctgcgtaagctggcagatgatatcaacgttctctacaccgccattaagctgtatctggcgcggatgccaaaagaagagctggcggaggaagagagccgccgctgggcagagatcatcgaaatgagcctcaaccttgaacaggcctccgatatcgtcgagcgcatgggcagcgaaattgctgacaaaagtctggcagcacggcgggcatttagccttgatgggttgaaggaactggatgcgctctatgagcaattgctcagtaatttaaagctggcaatgagcgtgttcttctctggcgatgtcaccagcgctcgtcgtttgcgtcgcagcaaacatcgttttcgcattcttaatcgccgctattcccacgcccacgtcgatcgcctgcatcagcaaaacgtgcagagcattgaaaccagtagcctacatttaggcttactgggagatatgcagcgcctgaacagcctgttttgtagcgtggcttacagtgtgctggaacagccggatgaagatgaaggacgggacgagtattaatattgtgaatcctgtaggcctgataagacgcgtcaagcgtcgcatcaggcactatgaacaagatgccggatcatgcatccggcaattcacttaaaaacggtgaccagcttccagcggaaccgcttcttcaccagccttaaacacataagtggtgttcgggccacccagcgtagcgtgacctttactcactgtgatccagttaccttccggtagaccaataatcgtcagttctggcgcgacgaccagcagttcgcgaatacgctgctcacgggtttcacctttatggccttccggcagcgcgttggtgaagtgcgggttgatttgcagcgggaacagatttagcgcatcgaaaccttgcggatcgacaatcggcatatcgttggtggtacgaatagttgggcaagcaaggttagcgcctgcgctccagccaatatacagagcgccacgtttaaccacgtcagtaattggtgccagcagcccgcgctcgcggcactgtttcagcaactggaaagtattcccgccgccgacaatcacgatctcagcattttcaatcgcggcaacgggatcgacaacgctatgaataccggtgacagaaacacccagcggagcgagaaccgcagccgttttcgctgtgtaatcatcccaggtctgcgttacgccagcgaaagggataaacaccgcactgcggcgaccctgcaactgttcagcaattagcggcagtgcatgttccagccaggctttacccggcagcgtgctgttactcaataaaagcagttccattacttctccggttagtaagaaatcacgggaggcatgctaccactgcgaatttaaccacttactgacatggctcacgatgtcgcacattgcttctggaaagtgatttgagcaggtaacgaattcaagccaatggaaataacaaatagttcgctcatgactattttttatcaacccaaaggtacggtatattccgttttttacaggagaatttatgctgcccgacagtagtgtccgtttaaataaatacatcagcgaaagcggaatttgcagtcgccgcgaagcggatcgctatatcgagcaaggcaatgtgttccttaatggcaagcgagccaccattggcgatcaggtgaaacccggcgacgttgtgaaagtaaacggtcagttgattgaacctcgggaagccgaagatttggtacttatcgccctgaacaagcccgttggtattgtaagcaccaccgaagatggcgagcgcgataacattgtcgatttcgttaaccacagcaaacgcgtgttcccgattggccgcctggataaagactcccaggggctgattttcctcaccaatcacggcgatctggtgaataagatcctgcgtgctggcaatgatcatgagaaagagtatctggtgacggtcgataaaccgattaccgaggagtttattcgcggcatgagtgcgggggtgccaatcctcgggacagtgaccaaaaagtgcaaagttaaaaaagaagcgccgtttgtcttccgcattaccctggtgcaggggctgaaccgtcagatccggcgcatgtgcgagcatttcggctatgaagtgaaaaagctggaacgcacgcgcatcatgaacgttagcttaagcggcattccgctgggggaatggcgcgatttaaccgacgatgagttaatcgacctctttaagctcattgaaaattcctcttccgaggtaaaacctaaagcgaaggccaaaccgaaaacagcgggcatcaaacgtccagtcgttaagatggaaaaaacggcggaaaaaggcggtcgcccggcgtccaacggtaagcgttttaccagcccggggcgtaaaaagaaggggcgctgattaacgcctcagactgatgaaaacggcccaaaagtgcccggacagtcccctcgccccttcgggaaaagggttagggtgaggggaaaattgtgttcacactgacgagtgaaaatctcaggcgttgattgtggattagcgcctgccgcgcgtgctcgtatttgcactccagctaaaactcgcttcaggatccggtttataagcctgctttttcttcaactggcgggcttttttcgcttcagcctcacgctcaaccattaatttatcgatgtaatctttcttaatgctgttggtttcggagttggtcaatacgcgaccatgcgcaatccgcgcccgatccagcagtgttttaagttcacgctgctcgcgttcagtcatctctttttgggtaatacgggggagtgccatgatggtgccctcagtgagccagagagttcagtgtacgggaattcgtttgcgagcagaactgataatattcattttgccttctcttaactatttatctctttcgataattaattagagatgcagataaaaaaattaaaggcaattattctccgataaagacgctggttaacagagtacaggctcgtttattgatgagcatagtgacaagaaaatcaatacggcccgaaatatagcttccaggccatacagtatttactcaaacaaattactatgcagtttttgcaccacctgctcggcatcttcgccgggcaccaggaagcacaggttatggctggatgcgccataacaaatcatgcgaatgttgaacggttccagtacgccgaatacctctttgccaacgccgcaggctttactcaggtcattgccaatcaacgcgaccagcgccagaccttcttccacctccacccgacacagtgcggaaagctccatcagcagagattgcgtcagcaacgtatcgccagtggaggtactaccggtggtatcaagggttaatgccacgctcacttcactcgtggtgattaagtctacgctaatattatgccgcgcgaggatgccgaaaacttccgcgaggaaaccgcgagaatgcagcatattcaggctgtgcaaagtgagcagagtctgattgcgacgaagcgccagagcgcggaacagcggcggattttcagttttattgcacaccagcgtaccacctgcgcgtgggtctttgctggagccgacaaagaccgggatatcgctgcgtactgcgggtagcaacgttgccggatgcagtacttttgcaccaaaagttgccatctctgccgcttcggcaaacgcgatttcatcaatgcgttttgctgcggaaactacgcgtggatcggtggtgtagatgcccgggacgtcggtccagatatcaacacgagatgcgtgtaaagcctccgccagcaaggctgccgtataatcgctgcctccacggccaagcgtcgttgtacgacctttattttcgctaccgataaatccctgggtgatcactaagccttcattgagacgtgggagcagctgcagcgcggccagttccgccagcgcggctatatctggctctgcacgaccaaatcggtcgttggtacgcatcactttacgtacatcaaaccactgtgcctgaacatcgcgttcgcgcaggatctcaacaaacagcagggtgctcatcagctcgccgtggctgaccagctcatctgtcagcgccggagacgttgccagcgccgccgcttctgccagaacagtaatgttctccagcagacgttcaatctcttcacggataacgttcgggtaacgcagacgttccagaatggcaaactggatgttgcggatagcgtcgagtttttcgaatcgctcgccaggttccagtccttcagctaaagcgaccagcagattagtgataccagcagaagcgctgaggacaactaaacgcacgttggcatcagaaagcacaatatcagcgctgcggttcatggcgtcaaaatcagctacgctggtaccgccaaatttggagacaacaatttcagacataactacctcgtgtcaggggatccattttcagccttggcacaagggaagagcggaagacgggtgggcgcagagcgatacttcgctactattttcacccagaagtgctccaccacttgcgaaacgcccgactgcgaacgcttctggtgacaacccaggggattcagcccctgtagccgatgatgaacgtggccagccgttcaatcacctcggcgatgcaccccctcaggtgttatcacaggactggctcctccaacaccgttacttgggcaacgcgcctcttctggcctgcgctagcgcaggtagtacatttataaataaagggtgagcggggcggttgtcaacgatggggtcatgcggatttttcatccactcctggcggtcagtagttcagctaataaatgcttcactgcgctaagggtttacactcaacattacgctaacggcactaaaaccatcacatttttctgtgactggcgctacaatcttccaaagtcacaattctcaaaatcagaagagtattgctaatgaaaaacatcaatccaacgcagaccgctgcctggcaggcactacagaaacacttcgatgaaatgaaagacgttacgatcgccgatctttttgctaaagacggcgatcgtttttctaagttctccgcaaccttcgacgatcagatgctggtggattactccaaaaaccgcatcactgaagagacgctggcgaaattacaggatctggcgaaagagtgcgatctggcgggcgcgattaagagcatgttctctggcgagaagatcaaccgcactgaaaaccgcgccgtgctgcacgtagcgctgcgtaaccgtagcaataccccgattttggttgatggcaaagacgtaatgccggaagtcaacgcggtgctggagaagatgaaaaccttcagtgaagcgattatttccggtgagtggaaaggttataccggcaaagcaatcactgacgtagtgaacatcgggatcggcggttctgacctcggcccatacatggtgaccgaagctctgcgtccgtacaaaaaccacctgaacatgcactttgtttctaacgtcgatgggactcacatcgcggaagtgctgaaaaaagtaaacccggaaaccacgctgttcttggtagcatctaaaaccttcaccactcaggaaactatgaccaacgcccatagcgcgcgtgactggttcctgaaagcggcaggtgatgaaaaacacgttgcaaaacactttgcggcgctttccaccaatgccaaagccgttggcgagtttggtattgatactgccaacatgttcgagttctgggactgggttggcggccgttactctttgtggagtgcgattggcctgagcattgttctctccatcggctttgataacttcgttgaactgctttccggcgcacacgcgatggacaagcatttctccaccacgcctgccgagaaaaacctgcctgtactgctggcgctgattggcatctggtacaacaatttctttggtgcggaaactgaagcgattctgccgtatgaccagtatatgcaccgtttcgcggcgtacttccagcagggcaatatggagtccaacggtaagtatgttgaccgtaacggtaacgttgtggattaccagactggcccgattatctggggtgaaccaggcactaacggtcagcacgcgttctaccagctgatccaccagggaaccaaaatggtaccgtgcgatttcatcgctccggctatcacccataacccgctctctgatcatcaccagaaactgctgtctaacttcttcgcccagaccgaagcgctggcgtttggtaaatcccgcgaagtggttgagcaggaatatcgtgatcagggtaaagatccggcaacgcttgactacgtggtgccgttcaaagtattcgaaggtaaccgcccgaccaactccatcctgctgcgtgaaatcactccgttcagcctgggtgcgttgattgcgctgtatgagcacaaaatctttactcagggcgtgatcctgaacatcttcaccttcgaccagtggggcgtggaactgggtaaacagctggcgaaccgtattctgccagagctgaaagatgataaagaaatcagcagccacgatagcagcaccaatggtctgattaaccgctataaagcgtggcgcggttaatcatcgtcgatatgtaggccggataaggcgttcacgccgcatccggcaaccgatgcctgatgcgacgcggtcgcgtcttatcaggcctacaggtcgatgccgatatgtacatcgtattcggcaattaatacatagcacgattgattaaataaccttaataacaatgccgacgttatgtcggcatttttttatcagataaatccccttgtctgtaatttaacggaaatcataccgtgaggttaatcctaaaatagatttttaatcgttgtttatttcggaaaatacgcagattaattgcttttgtttttattttaagtttatgatttttattgttatttaaatataagttgaaacttatatttgatattcattccaattatcctaaaacgccatcgctaattccccgcgccgtaattcgcatgctttagttgtgtatactcgatcccgcccgaaatgtttttgggtaaatctccattcattcaatgaagggaaattgttatgaaaaaagttctgtatggcatttttgccatatctgcgcttgcggcgacttctgcgtgggctgcacctgtacaggtgggcgaagcggcagggagcgcagcaacgagcgttagcgcggggagttcctccgcgaccagcgtcagcaccgtaagcagcgcggtgggtgtcgcgcttgcggcaaccggtggcggtgatggttctaataccgggaccaccacaaccacgaccaccagtacccagtaataaagtatgtatccccaaaataattcgagtcattgcatctgtggctagaagtatgaagggattaaccataaccacactccggtgtggttattctgcccctctggagaagagtcgtgaagcgacctgcactcattcttatctgcctgttattacaggcctgtagtgccacgactaaagagctgggcaatagtctgtgggacagtctgttcggcacgccaggcgtacagctgacggatgatgatattcaaaatatgccctacgccagccagtacatgcagcttaatggcgggccgcagttatttgtggtgctggccttcgctgaagacggacaacaaaaatgggtcactcaggatcaggctactctcgttacccaacatggccgtctggtgaagactctgctcggcggcgacaacctgattgaagtgaataaccttgctgccgacccgctgattaaacccgcacaaatcgttgatggcgcaagctggacgcgcacgatgggctggaccgagtaccagcaggtacgctacgccaccgcacgcagtgtcttcaaatgggatggcaccgataccgtcaaagtcggcagcgatgaaaccccggttcgcgtgctggacgaagaagtctccaccgaccaggcgcgctggcataaccgctattggatcgacagcgaagggcaaattcgccagagcgaacagtatctcggcgcggattattttccggtgaaaaccactctcatcaaggcggcaaaacaatgattaaacaaactattgtcgcgttgcttttgagtgtgggagcgagtagcgtcttcgcggcaggaaccgtcaaggtgttcagcaatggcagcagtgaggccaaaacgctaacgggcgcagagcatttaatcgatctggtaggccaaccgcggctggcaaacagctggtggcccggtgcggtgattagcgaagagctggcaacggcggcagcattgcgtcagcagcaggcgttgctgacacggctggcagaacagggcgcagattccagcgccgacgatgccgctgcgattaacgccttacgccagcaaattcaggcgttgaaagtgacgggcaggcaaaaaatcaatcttgatcccgatatcgtccgcgttgccgaacgcggtaacccgccgttgcagggcaactacacgctgtgggtcggaccaccgccgtccacggtcacgttgttcgggcttatcagccgtcctggcaagcagccattcactccaggtcgcgacgtggcgagctatctctctgaccagagcctgctcagcggtgcggatcgcagctacgcgtgggtggtttacccggacggacgcacgcaaaaagcgccggtggcttactggaacaagcgtcacgtagagccgatgcccggcagcattatttatgttggcctcgcggactccgtctggagtgagacgcctgatgcccttaacgccgacattcttcagactctgacgcagcggatacctcaataatgaaaaaaagacatctgcttagcttactggcgctgggcattagcacagcttgctacggcgaaacatatcctgcgcccattggtccgagccagagcgatttcggtggcgtaggattattacaaacgcccaccgcgcgtatggcacgggaaggggagttgagtctgaactatcgcgataacgatcagtaccgttattacagtgctagtgtgcaactcttcccgtggctggaaacaacgctgcgctacaccgacgtgcgcacccggcagtacagcagcgtcgaagcgttctctggcgatcaaacgtataaagataaagccttcgatctcaaactgcgtttgtgggaagagagttactggctgccgcaagtggcggttggtgcgcgggatatcggcggtacggggctgtttgatgcggaatatcttgttgccagcaaagcctgggggccgttcgattttacgctcggcctgggctgggggtatttgggcaccagcggtaatgtgaaaaatccgctctgtagtgccagtgataaatattgctatcgcgataacagctacaaacaggcgggatctatcgacggtagccagatgttccacggtcctgccagtctgtttggcggcgtggaataccagacgccctggcaaccgctgcgcctgaaactggagtatgaaggcaataattatcagcaggattttgccgggaagctggagcaaaaaagtaagtttaacgtcggtgcgatttatcgcgttaccgattgggccgacgttaaccttagctatgaacgtggcaacacctttatgtttggcgttacgttgcgcaccaactttaacgatctgcgcccgtcttacaacgataacgcccgcccgcaatatcaaccgcagccgcaggatgccattttgcagcatagcgtggtggcgaatcagttaacgctgttgaaatacaatgccggacttgccgatccacagatccaggcgaaaggcgatacgctgtatgttaccggcgagcaggtgaaatatcgtgatagccgcgaagggatcatccgtgcgaatcggatcgtgatgaacgatctgccggatgggatcaaaacgatccgcattacggaaaatcgccttaacatgccgcaggtgacgacggaaaccgatgtcgccagcctgaaaaatcatctcgccggagagccgttgggccacgaaacgacgctggcgcaaaaacgcgtcgagccagtggttccgcagtccaccgagcagggctggtatatcgacaaaagtcgctttgatttccatatcgatccggtgctgaaccagagcgtcggtggcccggaaaacttttacatgtatcagctgggcgtgatgggaacggcagatttgtggctgacggaccatctgctgaccaccggcagcctgtttgcaaatcttgccaacaactacgacaagtttaactacactaatcctccgcaggacagccacttaccgcgcgtgcgtacccatgtgcgcgagtatgtgcagaacgatgtctatgtgaataacctgcaagccaactacttccagcatctgggcaacggcttctacggtcaggtctacggtggttatctcgaaaccatgtttggcggtgcgggggcagaagtgttgtatcgcccgctggacagcaactgggcgtttggtctggatgccaactacgttaaacagcgcgactggcgtagtgcaaaagatatgatgaaattcaccgactacagcgtgaaaaccggacatctgaccgcctactggacgccatctttcgctcaggatgtgttagttaaagccagcgtcgggcagtatctggcaggggataaaggcggcacgctggagatcgccaaacgctttgatagcggcgtggtggtgggtggctatgccacgatcactaatgttagcaaagaggagtacggcgaaggggacttcaccaaaggcgtgtatgtcagcgtaccgttggatctcttcagctctggcccgacacgcagccgtgcggcgattggctggacgccgctgacgcgtgacggtggtcagcaacttgggcgtaagttccagttgtatgacatgaccagcgaccgtagcgtcaatttccgctaagtcatgggaaaggtgccagttttcgcactcactggcaccttcattcttaatggcctgtcgagccatcaggaacgcagttcactcccggtttgcgatctggtgtgtaaaggcgaaaacattctgtcttcctgtccgtcgatatcggttgcaggtctggttgcctgagcgactgggccatcattgggctggagacattgctttgcggtaggtcggctttatcagcagtaccgagcggaccagcataagcaggaagaacagagactgataacatcaaagcagcaaaataaggcttcatttttaccacctttatcaggttacgtttcatttgttccagaggaacattgtcgatttttcgcgcattgctggtggctgggaatcacctgaatgggtgatttttgaattaccggctttggtgcggtttgtcttgccggatgcgccgccaggcgcggcttatccggcctacgggtaggtatatccggctttggtggaggcgcgctccaaatccaggttgaacaaaacatacacaaaaaatatagatctccgtcacatttttgcgttatacaggaagctcgccactgtgaaggaggtactgctatgacgagtctctctcgtccgcgcgtggagtttatctccaccattttgcagaccgtactcaatcttggcctgctgtgcctcggcctgattttggttgtcttcctcggcaaagaaacggtgcatctggctgatgtgctgttcgcgccagaacaaaccagcaaatatgagctggtagaaggactggtggtttactttctctatttcgaatttatcgcgctgattgtgaagtactttcagtccggttttcacttcccgctacgttactttgtctatattgggatcaccgccattgtgcgcttgatcatcgtcgatcataaaagcccactggatgtgttgatctacagcgctgcgatcctgttactggtgatcaccctgtggctgtgtaatagcaaacggctgaagcgggagtaaaaagtcagcacgccgaaatggcgcggcgtgctggacaggaagattacagcgtagcagtttgttgtgttttcttcgtttccggttcccagagcgcttccagctcctcaagggttttacctttggtttccgggacaaatttccacataaacagtgctgccagaacgcccatacaaccgtaaatccagtaggagaaaccgttgtggaaatgggccaccagccaggagtttttgtccatcatcgggaaggtccaggagacgaagtagttcgccagccactgggccgccaccgcgattgccagcgctttaccacgaatagcattcgggaagatttcgctcagcagtacccagcataccggaccccaggacatggcaaaggcggcaacatagaacagcatgctcagtagcgccacaatacccggtgcctgagtgtaaaacgcggtaccgaggctaaacataccgattgccattccgagtgcgccgataatttgcagtggcttacgaccaaatttatccaccgtcataattgccagaacggtgaaggtgaggttgataactccgacaataatggtctgcaacagcgcgatatccgtgctggcccccagcgttttgaacacttccggcgcgtagtacagcaccacattgatgccgacaaattgctggaagatggagagcattacgccgattacaatcacgcccacgccaaacatcagcagacgaccaccggttttgcggccatgatccagggagtgtttaatttcctgtactgcctgagttgcaagcgtgttgcccataattttgcgcaggataccttccgcctgttcttgcttgccgcggctcatcagccagcgaggactttctggcacggtatacagcagcattaagaacagcagtgcagggatacattcgctggcaaacatataacgccagccgtcagtattcagccagctggcatcaccggaacgggcaataaaatagtttacgcagtaaactaaaagttgcccgaaaataatcgcaaactggttaaaagagaccagtttcccgcgaatatgagctggagccagttccgcaatatacattgggctgagcatactggctaaaccaacgccaataccgccaataatgcgataaataacaaattccgggacataacctgccagataaacaggcacagtgttgtccgggtttatagaggtaaaaccaagttctggccaggcagaacctacaccagaaataaaaaacaggacagcagcaatcttaagactatcacgacgaccgaagcggttactgcaataaccaccgagggcaccgccgatgatgcaaccaatcagagcgctggccacgcaaaaccctaacagggagttggcagcggattcacttaagttttgtggagcaacaaagacggtattgagactctcaacagtaccggaaataacggcggtgtcgtagccaaataataaaccacctaatgtagcgactaaggtaatgctaaatatataactggaattatactgggtattcattcagacctgccttagaccattctgatcttttatcagtgcattgatgttggaattgtcaggcagttaaggcaattatcattttttacaatgcgtttacgtaatgtcttttctgtgatcttaattgtgataattatccaaaattgataaaaacaatactattgccgtgactcagagcacgaaagagaattatcgtaagtgggaaaacaaataacgtaaaaataataagctctatgatggaaatattaaccggcgaacgattcagattgcagacgaaagaaaaaaaggcgctccgtggagcgccgaataacagtcacaagttgggataacgtaagttgagggtgcagcggcataacattggcagaacaacatctttaacctttcacaccacctgccgtcaggccgttgaccagccagcgttgagccagcaagaagacgatggtgatcggtaatgcagacatcacggcagcggcggcaaagtcaccccacaggtagttttgcgggttgaggtattgctgcatccccacggccagggtgtagctgtttacgtcacgcagtaacaggctcgcgaccggaacttcagtaatggcagcgataaagctcaggatgaataccaccgccagaatcggtacactcagcggcaacaggacaaggcggaaggcctgccacggtgtcgcaccatccagcgcagcagcttcttccaggctactgtcgatggtttcgaaatagcctttgatggtccagacatgcagcgcaatcccacccagatacgcgaaaattacgccgccgtgagtattcaggccaatgaatggaatgtactcacccagacgatcaaacaacgcatacaacgcgaccagactaagtactgccgggaacatctggaaaatcagcattcctttcagcagcgtcgctttgcctggaaagcgcatacgggcgaaagcgtaggcgcaggtggtggagagcgccacaatgccaatcgcggaaatcccggcgacctttacgctgttccacagccacagcagtaccgggaatggcggtggcgtaatgcgaccatcagcctgttcaacgctaaaacctaacgccagtttccagtgatcccaggagatttgctccgggatcaggctgccggtcgcaaagtttccctgacgcaggctgatagcgacgaccatcagcagcgggaacataatcgctgcgataaaaagtagcagtagcaggtgagtaataaataaacgagctttttggcttttcggttggaccattgccatttttgttatctcccttaatcaaacttcattcgcgtggctttcaggttcactatcgccagcgcacccaccagcaggaagatcagcgtggcaattgctgccgccagaccgaagtcctgacccccgccgccttcaaaagcgatgcggtaggtgtagttaacaagcaggtcggtataaccggctggcgtggtcgtgccaagacgatccgggccgccgttggttaacagttgaatcagcacgaagttgttaaagttaaaggcgaagctggcgatcatcagcggcgtcagcggtttaatcagcagcggcagcgtaatcttaaagaagttctggaacggacctgcgccatccattgcactggcttcatacaaatcgtccggaatcgctttcagcaagcccatgcagaggatcatcatgtacggataacccagccaggtattgacgataattagcatcgtgcgggcggtggtcggatcgctgaaccaggcgggcttcacgccaaacagcgcgctcaacatcatgttgatttcaccgaagctctggttaaacaaccctttgaaaatcaagatactaatgaagcttggcaccgcgtagggcagaatcagcaggacgcgatagaccgctttgccgcgcaacgcttcccactgcaccagacacgccagaaccatgccgaccgccaccgttaaaaagacagtgatcaggctgaacaccacggtccagacgaaaatggcgaggaacggtttctgaatgccttcgtcggtaaagacgcgggtaaagtttttccagccggtggtcacggtgtaaccggggcttagcttttcatcaccccagttgccgtcggcggtaatggactggtaaaagccaatttggttattcggacgatatttcacgccgctctgattattcgtcaacgtgccgtcaccgtcgagtgtgtagagcggctgcgtgccagaaaactggcgcagggagctcatcatcactttgttgccatccggcagaatggcggtaatgtcactcagcgcctgacgattctgggtaatcacgcgcagattcgcgcgttcgccttcgggctgggcggtcgtttctttcagttgcagtttttgctcgccgccaaatttaaaagcgtcggagaggtaatttttgccggtttcgccgtcgctgagcgccagttgccactcatcgcccgccgggtaaagaccaaagttataggttttgcctgcttgccaggagcgatctaacaacacttcctgcgcacgttcaaaagtcagctggttagtgctgctgtagttggtgaaggcaatggcgatggtgcagaccagagggaagaggacgaataatcccattccagccattcccgggtaaacatagcgccaggcgtaggctttacgattggcgaaaatatacagccccgcactactcaatatcagcgtggtaatggcgaacaggtattccccttgtgcgtacattaaaacaacaaggtaacccaccagcaggccgagcagacctagcacactccatttcagcgcgtcgctttgccaccaatgtttctttttaatgacatccatggggttcttcctcattccaggacggataaggctttcacgccttatccgacaacaactgcctgatgcgacgctgacgcgtcttatcaggcctacatacgtttcggttttgtaggccggacaaggcgttcacgccgcatccggcatttcacagcattacttggtgatacgagtctgcgcgtctttcagggcttcatcgacagtctgacgaccgctggcggcgttgatcaccgcagtacgcacggcataccagaaagcggacatctgcgggatgttcggcatgatttcacctttctgggcgttttccatggtggcggcaatacgtggatctttcgccaactcttcctcgtaagacttcagcgctacggcacccagcggtttgtctttattaaccgcttccagaccttcatcagtcagcagatagttttcgaggaactctttcgccagctctttgttcggactggcggcgttaatacctgcgctcagcacgccaacgaacggtttggatggttgacccttgaaggtcggcagtaccgttacaccataattcactttgctggtgtcgatgttggaccatgcccacgggccgttgatggtcatcgctgtttcgcctttattaaaggcagcttctgcgatggagtaatcggtgtctgcattcatgtgtttgtttttaatcaggtcaaccaggaaggtcagacccgctttcgcgccagcgttatccacgcccacgtctttaatgtcgtacttgccgttttcatacttgaacgcataacccccgtcagcagcaatcagcggccaggtgaagtacggttcttgcaggttgaacatcagcgcgctcttacctttcgctttcagttctttatccagcgccgggatctcttcccaggtttttggcgggttcggcagcagatctttgttataaatcaggcttaacgcttcaacagcgatcgggtaagcaatcagcttgccgttgtaacgtacggcatcccaggtaaacggatacagcttgtcctggaacgctttgtccggggtgatttcagccaacaggccagattgagcgtagccaccaaagcggtcgtgtgcccagaagataatgtcagggccatcgccagttgccgcaacctgtgggaatttctcttccagtttatccggatgctcaacggtgactttaattccggtatctttctcgaatttcttaccgacttcagcgagaccgttatagcctttatcgccgttaatccagattaccagtttaccttcttcgattttggcgagagcgctggcggaaaacatcatcgtcgttaatgcggataatgcgaggatgcgtgcacctgtttttattttcataatctatggtccttgttggtgaagtgctcgtgaaaacacctaaacggactctagtttctttatacggcaacctctttccatcctccttgcccctacgccccaccgtcgctttgtgtgatctctgttacagaattggcggtaatgtggagatgcgcacataaaatcgccacgatttttgcaagcaacatcacgaaattccttacatgacctcggtttagttcacagaagccgtgttctcatcctcccgcctcctcccccataaaaaagccagggggtggaggatttaagccatctcctgatgacgcatagtcagcccatcatgaatgttgctgtcgatgacaggttgttacaaagggagaagggcatggcgagcgtacagctgcaaaatgtaacgaaagcctggggcgaggtcgtggtaagcaaagatatcaatctcgatatccatgaaggtgaattcgtggtgtttgtcggaccgtctggctgcggtaaaagcactttactgcgcatgattgccgggcttgagacgatcaccagcggcgacctgttcatcggtgagaaacggatgaatgacactccgccagcagaacgcggcgttggtatggtgtttcagtcttacgcgctctatccccacctgagtgtagcagaaaacatgagttttggcctgaaactggctggcgcaaaaaaagaggtgattaaccaacgcgttaaccaggtggcggaagtgctacaactggcgcatttgctggatcgcaaaccgaaagcgctctccggtggtcagcgtcagcgtgtggcgattggccgtacgctggtggccgagccaagcgtatttttgctcgatgaaccgctctccaacctcgatgctgcactgcgtgtgcaaatgcgtatcgaaatctcccgtctgcataaacgcctgggccgcacaatgatttacgtcacccacgatcaggtcgaagcgatgacgctggccgacaaaatcgtggtgctggacgccggtcgcgtggcgcaggttgggaaaccgctggagctgtaccactatccggcagaccgttttgtcgccggatttatcggtagcccaaagatgaacttcctgccggtaaaagtgaccgccaccgcaatcgatcaagtgcaggtggagctgccgatgccaaatcgtcagcaagtctggctgccagttgaaagccgtgatgtccaggttggagccaatatgagcctgggtattcgcccggaacatctactgccgagtgatatcgctgacgtcatccttgagggtgaagttcaggtcgtcgagcaactcggcaacgaaactcaaatccatatccagatcccttccattcgtcaaaacctggtgtaccgccagaacgacgtggtgttggtagaagaaggtgccacattcgctatcggcctgccgccagagcgttgccatctgttccgtgaggatggcactgcatgtcgtcgactgcataaggagccgggcgtttaagcaccccacaaaacacacaaagcctgtcacaggtgatgtgaaaaaagaaaagcaatgactcaggagatagaatgatgattactctgcgcaaacttcctctggcggttgccgtcgcagcgggcgtaatgtctgctcaggcaatggctgttgatttccacggctatgcacgttccggtattggttggacaggtagcggcggtgaacaacagtgtttccagactaccggtgctcaaagtaaataccgtcttggcaacgaatgtgaaacttatgctgaattaaaattgggtcaggaagtgtggaaagagggcgataagagcttctatttcgacactaacgtggcctattccgtcgcacaacagaatgactgggaagctaccgatccggccttccgtgaagcaaacgtgcagggtaaaaacctgatcgaatggctgccaggctccaccatctgggcaggtaagcgcttctaccaacgtcatgacgttcatatgatcgacttctactactgggatatttctggtcctggtgccggtctggaaaacatcgatgttggcttcggtaaactctctctggcagcaacccgctcctctgaagctggtggttcttcctctttcgccagcaacaatatttatgactataccaacgaaaccgcgaacgacgttttcgatgtgcgtttagcgcagatggaaatcaacccgggcggcacattagaactgggtgtcgactacggtcgtgccaacttgcgtgataactatcgtctggttgatggcgcaagcaaagacggctggttattcactgctgaacatactcagagtgtcctgaagggctttaacaagtttgttgttcagtacgctactgacagcatgaccagccagggtaaagggctgagccagggttctggcgttgcatttgataacgaaaaatttgcctacaatatcaacaacaacggtcacatgctgcgtatcctcgaccacggtgcgatctccatgggcgacaactgggacatgatgtacgtgggtatgtaccaggatatcaactgggataacgacaacggcaccaagtggtggaccgtcggtattcgcccgatgtacaagtggacgccaatcatgagcaccgtgatggaaatcggctacgacaacgtcgaatcccagcgcaccggcgacaagaacaatcagtacaaaattaccctcgcacaacaatggcaggctggcgacagcatctggagtcgcccggctattcgtgtcttcgcaacctacgccaagtgggatgagaaatggggttacgactacaccggtaacgctgataacaacgcgaacttcggcaaagccgttcctgctgatttcaacggcggcagcttcggtcgtggcgacagcgacgagtggaccttcggtgcccagatggaaatctggtggtaatagcaaaacctgggccggataaggcgtttacgccgcattcggcaaccaacgcctgatgcgacgcttgcgcgtcttatcaggcctacaacggctgtcaaatgtaggccggataaggcgtttacgccgcatccggcataaaaacaggttgtcattatctgaaaggggcgaaagcccctctgattatcgggtttagcgcgctattgcctggctaccgctgagctccagattttgaggtgaaaacaatgaaaatgaataaaagtctcatcgtcctctgtttaagtgcagggttactggcaagcgcgcctggaattagccttgccgatgttaactacgtaccgcaaaacaccagcgacgcgccagccattccatctgctgcgctgcaacaactcacctggacaccggtcgatcaatctaaaacccagaccacccaactggcgaccggcggccaacaactgaacgttcccggcatcagtggtccggttgctgcgtacagcgtcccggcaaacattggcgaactgaccctgacgctgaccagcgaagtgaacaaacaaaccagcgtttttgcgccgaacgtgctgattcttgatcagaacatgaccccaagtgccttcttccccagcagttatttcacctaccaggaaccaggcgtgatgagtgcagatcggctggaaggcgttatgcgcctgacaccggcgttggggcagcaaaaactttatgttctggtctttaccacggaaaaagatctccagcagacgacccaactgctcgacccggctaaagcctatgccaagggcgtcggtaacagcatcccggatatccccgatccggttgctcgtcataccaccgatggcttactgaaactgaaagtgaaaacgaactccagctccagcgtgttggtaggacctttatttggttcttccgctccagctccggttacggtaggtaacacggcggcaccagctgtggctgcacccgctccggcaccggtgaagaaaagcgagccgatgctcaacgacacggaaagttattttaataccgcgatcaaaaacgctgtcgcgaaaggtgatgttgataaggcgttaaaactgcttgatgaagctgaacgcctgggaagcacatctgcccgttccacctttatcagcagtgtaaaaggcaaggggtaattacgccccacagtgctgattttgcaacaactggtgcgtctcctggcgcacctttttttatgcttccttcctgggatatgagcgattttttatagtaactcacttcttcttcactaagaatatccattatctcaatgccttatcagagattcttttcctttcgccggtagtgtctggacattcaggctacttttccaggttattttatttctgttatgcagaggttttatgataagtcatatcctaaattctggcggcaataactctttgatgaaacatgatgtggtgcaaggaaataatatagtagatcttgatttactacgtaatttaaatggggtgccaggtttaaacagagataactttatttatatcagcaatattttttcaaatataaaacaacggaacgaaaaaatcatgcaataaatatgtttcgtgaagtctcaatcagtaatgatactataagtgtaaaattctacagaaatgaaaaaaattgaatgcgcttgcaattttctgatggataaagatgcgcaggggtatatcgacctgtctgatttggatttaacaagttgtcattttaaaggtgacgttataagcaaggtgtcttttttaagtagtaatctacaacatgtaacattcgaatgtaaagaaattggggattgcaattttactactgcaatagttgataatgtcatatttagatgtcgacgtttacacaatgtgatttttatcaaagcgagtggtgaatgtgtcgatttcagcaaaaatattcttgatacagttgacttcagccagagtcaacttggtcatagtaattttcgcgaatgtcagattagaaatagtaacttcgataattgttatctttacgctagccacttcaccagagcagagtttctgtctgccaaagaaataagttttattaaaagcaatttgacagctgttatgtttgattatgtgcgaatgagcacagggaattttaaagattgcattacagaacaattggaattaactattgattatagtgatatattttggaatgaagatctcgatggttatatcaataacattataaaaatgattgatacattgccagataatgcaatgatattgaaatccgttctggccgtaaaactggtgatgcaattaaaaatacttaatattgttaataaaaactttattgagaatatgaagaaaatatttagccattgtccttatataaaagatcccattatacgcagttatatccattctgatgaagataacaagttcgatgattttatgcgtcaacatcgattcagtgaggtgaatttcgatacccaacagatgatcgattttattaacagatttaatacgaataaatggctaattgataaaaataacaatttttttatccaacttatcgatcaggccttacgaagtacggatgatatgatcaaagcaaatgtttggcatctttataaagagtggattcgtagtgatgatgttagtcctatatttatagaaactgaagataatttaagaacctttaacacgaatgaattaacacgaaacgataatatctttatcctgttctccagtgtcgatgatgggccagttatggtggtaagctcccagcgcttacatgatatgttgaatcctacaaaagataccaattggaattccacgtatatctacaaatccagacatgagatgttgcctgttaatcttactcaggaaacacttttcagctccaaatctcatggtaaatatgcgcttttccccatttttactgcgagttggcgagctcatcgtataatgaataagggtgtttaagtaaaggaaaacatcaccgttcctggcatcctggacggtgatgcccctacggttgccctcgccagcacgggcatcggtaaagcgtaaggttcaacatcgttttaccacttcatgcgattgttgcgtttttgttgcgtattagatcacttaatttgctttacatctcccgtaaacacttttctgcgatacaatgcctttacgttatgtaacggagagttcggcatgagtcaccccgcgttaacgcaactgcgtgcgctgcgctattgtaaagagatccctgccctggatccgcaactgctcgactggctgttgctggaggattccatgacaaaacgttttgaacagcagggaaaaacggtaagcgtgacgatgatccgcgaagggtttgtcgagcagaatgaaatccccgaagaactgccgctgctgccgaaagagtctcgttactggttacgtgaaattttgttatgtgccgatggtgaaccgtggcttgccggtcgtaccgtcgttcctgtgagtacgttaagcgggccggagctggcgttacaaaaattgggtaaaacgccgttaggacgctatctgttcacaagtagcacattaacccgggactttattgagataggccgtgatgccgggctgtgggggcgacgttcccgcctgcgattaagcggtaaaccgctgttgctaacagaactgtttttaccggcgagtccgttgtactaagaggaaaaaaatatggagtggagtctgacgcagaataagctgctggcgtttcatcgcttaatgcgtacggataagccaattggcgcgttactgctgctctggccaacattatgggcgttgtgggtggcgacaccgggcgttccccagctctggatcctggcggtgtttgtcgcgggtgtctggctgatgcgcgctgccggatgtgtggtgaatgattatgctgaccgcaagtttgatggtcatgttaagcgcacggcgaaccgaccacttcccagcggcgcggtaacagagaaagaggcgcgcgcgctgtttgtcgtgctggtactgattagctttttactggtgctgacgctgaatacgatgaccattctgttgagcattgccgcgctagcgctggcgtgggtgtacccgtttatgaagcggtatacccatctaccgcaagtggtgctgggcgcggcgtttggctggagcattccaatggcttttgccgctgtgagtgagagcgtgccattgagttgctggttaatgttcctcgccaatattctctgggcggtggcttacgacacgcagtatgcgatggttgaccgcgatgatgatgtgaagattggcattaaatccacggcaatcctgttcggccaatacgataaattgattattggtattttgcagattggcgtactggcactgatggcgatcatcggtgagttaaatggcttaggctggggatattactggagtattctggtggctggcgcgctgtttgtttatcaacaaaaactgattgccaaccgcgagcgtgaagcctgctttaaagcatttatgaataataactatgttggtctggtactatttttagggctggcaatgagttactggcatttctgatgatgtaaaaaagccggatgatcatccggctttcttctgggttgcctgatgcgcggcgcttctcaggcctacacaacacatcgcaatttattgaatttgcagattatggaaggccggataaggcgttttcgccgcatccggcaattctctctgattacccttcgccctgcgtcgcactctcaatcgtcaaacgcacgtcacttgtaatcaactccgccagcaactgataaaccttcatcgtttctgccggttcggcatcgccgctatcgctgatatacccttcatcacgcagtgtcagcaccagagaactgaacaccgccttgtcgaagaactccggcgcgttgatgccgtgcagcacggagagacgttgcgcgacggtgcggctctctttctccagcgtaccgcggttgatgctcgggttggcactcaacaaccagaaggtgatggcataacgttgcagcgtttcgcgcgcgcctgcggccagcagctgtagcgtgcgagaatgcgccgggttgatatgcaactcatcatcttgcagggtaatcagcccctgacgttgcatctcatttgccagcgcatcaataacgtccggcaactcgtcgcgatcccagcgcaggaacagctccgctttcagcattgggtaaagcacattgacgtgctccatcaatacgtcgcgggagatgtggcgatgctgggtgacgattgccgccatcaggctaggcagcaccaacatatgcgcaatgttgttgcgatagtaggtcatcagcaccgcttgctcgcgcggcagaatgatgatgtcgccgattgtgtctttctcgacttcaaacttgttcatttgcagcgcgtgatcgataagctcgctggcgctggcactaggaacggtagagtccgtggagtagggcacgttgcgcatcagatccaggtagcagttgagttgctcggttaactgctcgcgggtgagactgcgctgacgacttgccagtagcgcagtacagcacaggttcatggcgtttgccgcgcctgcgttgttaatgcgtaccatcagatcggcagcaatattattgaccgtcggcgttaaccatgccggacgcaccgcttcgatgggatcgatagattcacgccagtcaggtacatgctggttaaggtaggtcatcaacggcattggttcaccgaagttgacgtaaccctgaccgagattacgcagcttgcttaaaccgcgcagcatctgcggcaggctctctttctctttcgtcgcgccgcgcagttctttggcgtaagtacccacttccatgacgtgctcataaccgatatagatcggaatcagcgtaatcggacgcgtgccgccacgcagcatcgcctgaatggtcatgctcagcgtaccagttttcggatccagcaaacgccccgtacgggaacgaccgccttccacgaagtactcgacggaataaccacggctgaacagttcgccgagatactcccggaaaacggtggaataaagtttattgcctttaaacgtacggcgaataaagaacgcccccagacggcggaaaatcggcccggcaggccagaaattcaggttgatcccggcggcgatatgcggcggcaccagcccctggtgatacagcacgtaagaaagcagcaggtagtccatgtgactgcggtggcaaggcacatataccagctcatgaccgtcgtgggccagctggcgaacgcgctcagcgttatggacgttgatgccctggtaaagtcggttccaggtgaagcccagaatacggtcagtcaggcgaatcatctcgtaagagaaattcgccgcaatctcttccatcagtgcaatcgcgttctgctgcgctttttcatgggagatttttttgctgcgcgcttcatcttctaccgctttggcaatggcgcgggaggcgagcagcttattaaacagatcctgacgagcaggcaaacgtgggcctacggcagccagacgttgacgggcaaagtgcatacgcgccacgcgcgccagtttctgagcgatagttttatccgtgccgtgttcatccgccatacggcgcaggctaacactcgggctgaaacgcacaaaactgtcgcgaccgagccacagtacagcgaaaaatttctgtacgccgttaagcatacgcagcggcgggttcacttcgcctttttcacgccccggcgcgcgaccaaacatcacgctcactggcaccatctgcacatccagatttgggttgctacggtgcaaatcgagatagtcgtggaacagcttaatagactcttctttcggcgtgtaataggtgaacacacgcggcccgccgtgaatgaacacatagcgcggcagtagcgtgccgtcgatttccagcggctctaacgggtcaggcaagtcatgtgccagacactgggcgcgcaacgtcagcaaatctgctttgctgttgtacggtaaaacgtacataattggacgagaggtatccagccccagttccggggcaggatctgccggaatagacttgctttttaccaggatgcttaatggtaaattcagtaatttgtagtaaattcgtggccagccggacataaacgatgtaaagcctctggttaataatgcaaatgcgcggcaaggatagcagaaagtcatgggaaattctgtggtatccgctcatgtttcgcgcggcgctacgcaaacccgaatcatcggatttaacggtacactgatattgacgctcataatgtaaaaaggttctttcaatggccaataataccactggattcacccgaattatcaaagctgctggctattcctggaaaggtttacgcgctgcatggatcaacgaagcggcattccgtcaggaaggcgtagcggtattgttggcggtggtcatcgcctgctggctggatgtggacgcgattacccgcgtgctgcttatcagctccgtgatgctggtgatgattgtggaaatcctcaatagcgccatcgaagcagtggttgaccgaattggctctgaataccatgagctttccggacgcgcaaaagatatgggatccgctgcggtgctgattgccattatcgtcgccgtgattacctggtgcattctgttatggagccattttggataacccttccagaattcgataaatctctggtttattgtgcagtttatggttccaaaatcgccttttgctgtatatactcacagcataactgtatatacacccagggggcggaatgaaagcgttaacggccaggcaacaagaggtgtttgatctcatccgtgatcacatcagccagacaggtatgccgccgacgcgtgcggaaatcgcgcagcgtttggggttccgttccccaaacgcggctgaagaacatctgaaggcgctggcacgcaaaggcgttattgaaattgtttccggcgcaagtcgcgggattcgtctgttgcaggaagaggaagaagggttgccgctggtaggtcgtgtggctgccggtgaaccacttctggcgcaacagcatattgaaggtcattatcaggtcgatccttccttattcaagccgaatgctgatttcctgctgcgcgtcagcgggatgagcatgaaagatatcggcattatggatggtgacttgctggcagtgcataaaactcaggatgtacgtaacggtcaggtcgttgtcgcacgtattgatgacgaagttaccgttaagcgcctgaaaaaacagggcaataaagtcgaactgttgccagaaaatagcgagtttaaaccaattgtcgttgaccttcgtcagcagagcttcaccattgaagggctggcggttggggttattcgcaacggcgactggctgtaacatatctctgagaccgcgatgccgcctggcgtcgcggtttgttttagttctctcttcatcaggcttgtctgcatggcattcctcactagttctgataaagcactctggcatctcgccttacccatgattttctccaatatcaccgttccgttgctgggactggtcgatacggcggtaattggtcatcttgatagcccggtttatttgggcggcgtggcggttggtgcaacggcgaccagctttctctttatgctgttgctgtttttacgcatgagcaccaccgggctgactgcgcaggcttatggtgccaaaaatcctcaggcattagcccgtacgctggtgcaaccgttgctgttggcgttgggggctggggcgttaattgcgctgctgcgtacgccgattatcgatctggcgctgcatattgttggcggtagtgaggcagtcctggaacaggcgcggcgctttcttgaaatccgctggttaagcgcaccggcgagcctggcgaatctggtattactcggttggttactcggcgtgcaatatgcccgtgcgccagtaattttgttagtggtcggcaatatcctcaacattgtgctggatgtctggctggtgatggggctgcatatgaacgtgcagggcgcggcgctggcgacggttattgcggaatatgcaacattgctgattggtctgctaatggtgcgtaaaatcctcaaactacgcggaatttccggcgaaatgctgaaaactgcctggcgaggaaacttccgtcgcttgctggcgcttaaccgcgatatcatgctgcgtagcctgttgttgcaactctgtttcggcgcgatcaccgtacttggcgcgcgactggggagtgacattatcgctgttaacgcggttctgatgacgctactcacctttaccgcctatgcgctggatggttttgcctacgcggttgaagcgcactccggtcaggcatacggtgcgcgcgacggtagccagttgctggatgtctggcgggcagcgtgccgccagagcgggatcgtagcgttactgtttagcgtggtttatttgctggctggggaacacatcattgcgttactgacgagcttaacccagattcagcagctggctgaccgctatcttatctggcaggtgattttgccggtggttggcgtctggtgttatctgctggacggcatgtttataggcgcaacgcgtgccaccgaaatgcgtaacagtatggcggtggccgccgcaggttttgcgctgacgctccttacgctgccgtggctgggtaatcatgctttgtggctggcattaaccgtctttctggcgttgcgcgggctttctctggcggctatctggcggcgtcactggcgcaatggtacctggtttgccgcaacgtgacggttaaaaattctgaataaataatcctaagccaaattgctgactacacttaatctcacgttcagaagaaaagtgaacgtactctcattcacaacctaacgatgaggtcttgattatgaataaagatgaagccggcggtaactggaaacagtttaaaggtaaagtgaaagagcaatggggcaaactgaccgatgatgatatgacgatcattgaaggtaaacgtgatcaactggtcggtaaaatccaggaacgttatggttatcagaaagatcaggcagaaaaagaggtcgtggattgggaaacccgcaatgaatatcgctggtaattaatccctcctgcccgacgtgtacaaggatgtacgccctcttaacgcggtttctttttcacctgcacagagtgatcatgctggcactgttcaggatgacgacacgcttccacttctacacatgccgcacagagcccatgtgcttcaatcacattatgccgcagggcaaaccccatttttgccgccagcgtatgcataatgtcttccacgccttctgcacactcttctttcactgcgccgcagcgatcgcaaataaacatggcactcgtatgggtgggctgatcgaacagatgacagagcacataactgttggtggattccaccttatgcacaaaaccttgctcaagcagaaaatccagcgcgcgataaaccgttggcggcttggcttgcggttcagcttcgcgcagtaaatcaagcagatcataagcgctgatagcgccatcctgcagactcatcaggcgcaacacttccaggcgctgtggggtcaggcgcacattacgctgcgcgcagattttttcagcctgcgctaataactcctgcgttgtggtcttttccatcgggcacctcaaagtgggggttaagaatgtccttactttaccatgttccaggaaaaacaccgagaacccttattgttgccgtaatgttgattttctgctttgtaggtaaggtgttatgttgccttgtcgtaccattatcaacacgataataattaataattcatttttaaataaattgcttcaagttaactcgctatttatttaactgggtttaaacgcatacctgtagttcagaaattatgagcgatttttgatagtgaccagatggcaaaagaattataaggaggacacggtacgacaaaaaaggtagatgaatcatgttgaagataatacccggtgcaactggatactttaataaaacactcaatagtaatcaattcgataatgaagatgcaatcaaagataaattagataatagaggtagtatcaaaggtaaattaaataatatatatggtaaatctattgattatgcagcgctgcgtcatcgggatataattattgcaaaaatagatttgtttattcaacgaatcacgcataatttatggcatgcacgtaaaaaaatgtgtttttaattgtgcaaataaatgatctcaaaatgtgggtcaataagtatattgacgattgcactgatgaggatttaaacgatcgtgactttattgcaagtgttgttgaccgggctatttttcatttcgcgattaatagtatatgtaatcctggggataataaagatgcaatgcccattgaacaatgtacttttgatgtagaaactaagaatgaccttccctccacggttcagctattttatgaggaatctaaggataatgaacctttagcgaatatacattttcaagcaataggttctggttttttaacgtttgttaatgcctgccaggaacatgatgacaacagcttaaaattatttgctagcctgttaattagtcttagttattctagtgcctacgcagatttaagtgaaacagtgtatattaatgaaaataatgagagctacctgaaagctcagtttgaaaaattatctcaacgtgatatgaagaagtacctgggagagatgaagcgtctggctgatgggggagaaatgaattttgatggctatctggataagatgagtcatctggtgaatgaaggaacgctcgatcctgatattttaagcaaaatgcgagatgctgcaccacaattaattagcttcgcgaagagctttgacccaaccagtaaggaagagattaaaatacttacagacacttctaaattaatttatgatttgttcggggttaaaagcgagaaataatatgtgaagttcttcgatagtatggaaggcattatataaaaggacccaatatttattgggttcttttttctctatcaatactattagcagggagatatatcaccagagtttaatgtgtgattttttatttatcgtcgaacctggattgtttatcattggccttaacaaagttaacggctaataagattatttccatcacttcgtgagagcttcatgccttgagaggatctcaattttcttttgcaatgagacaggcgcttcctgttgttatggtatagtaccccgctattgagcctcctgaatagtgatgctgaataacataaccccatgatatatcgataaaataatctctacatttgaaaatgcacggtaattctgaaatgcaaaaaatcaaccaaaccagcgcaatgcctgaaaaaactgacgttcactggagtggtcggtttagcgttgcaccaatgctcgactggacggacagacattgccgctatttcttgcgtctgctttcccgcaatacgttgctgtataccgaaatggtgaccacaggggcgattattcacggtaaaggtgattatctggcgtacagtgaagaagaacatccggtagcgttgcaactgggcggtagcgatccggcggcgctggcgcagtgtgcaaagctggcagaagcgcgcggatatgatgagatcaacctgaatgtcggctgcccgtctgaccgggtgcagaacggcatgtttggtgcgtgtctgatgggtaatgcgcagctggttgccgactgcgtgaaagcgatgcgcgatgtggtgagcattccggtgacggtgaaaacgcgtattggcatcgacgaccaggacagctatgaatttctctgcgatttcatcaataccgtttccggcaaaggcgagtgtgagatgttcatcatccacgcacgtaaagcctggcttagcgggttaagcccgaaagaaaaccgtgaaatcccgccgctcgattatccgcgtgtgtatcaactgaagcgtgactttccgcatctgacaatgagcattaacggtggtatcaagagcctggaagaggccaaagcacacctgcaacatatggatggcgtgatggtcgggcgcgaggcgtatcagaatccgggtattctggcggcggtagaccgggagatctttggttccagcgataccgatgccgatccggtggcggtagtgcgcgccatgtatccgtacattgagcgtgaactcagccaggggacgtatctcggccatattacccggcatatgttgggcttgttccagggtattcctggcgcgcggcagtggcggcgttatttaagtgaaaatgcccataaagcgggtgcagacattaatgtgctggaacacgcgctcaaactggtggcggataagcgttaacttttcaccaaaaagtagtcaaattcaccacgccctgcgcaccgtcgcggggcgttttgctgttaaatcaatagattatttttggcatgattcttgtaatgccagcaagagatttcatatttgggagagcatcatgctggaactactttttgtgattggcttttttgtcatgctgatggtcaccggcgttagcttgctgggcattatcgccgcgctggttgtggcgacggccattatgttcctcggcggtatgctggcattgatgattaagttgctgccgtggttactactggcgattgcggtggtgtgggttattaaggcgattaaagcaccaaaagtgccgaaatatcagcgttatgaccgctggcgttactaagggattgtgcggatgatcacaacctaaggttttatccttagaacaaaataggaattgataatcaaatctgtcactattgcgcctctaacagattcatcgtgctgtaccctacatacagccgaactataaaaagaaagggcttcccaggtggaagccctatttcttttatggaatcagcaggctggaaccttgcgtcgcccggctttccagaatctcatgcgcacgctgcgcatccttcagcggatatttctgctgctcggcgacatcgaccttaatcacaccgctggcaatcaaagagaacagttcattactggcctcggttaattcctcccgcgtggtgatatagccttgcagggaagggcgtgtcacatacaagctgcctttttgattgagaatgcctaagttcacaccggtaaccgcaccactactgttgccaaaactgaccattaagccgcggcgttgcaggcaatccaggctccgttcccaggtgtctctgcccacggaatcgtacaccacgcgcactttcttaccgccggtgatctcttttaaccgctcgaccagatcctcttcacgatagttaataacctgccacgcgcccgcttttagcgcgctctgcgctttttgcgcggttcctacggtgccgataagtttcgcgcccagggcttttgcccactggcaggcaattaagccaacgccgccagccgctgcgtggaacaggaactgttcatcgggtttaatttcataggttttgcgcagcagataataaaccgttaagcctttcaggaaggatgccgcagcttgctcaaaagaaattgccgcaggcagaatcgccgctttatccgcaataatgttatgcacagagctgtaagcgcctaacgcgctctgcgcatagactacacgatcgcctgccttaatatgctttacaccactgccgactttactcacgatgcctgctgcttcggtgcctaatccgctgggtaggcttggcggcgggtaaaggccgctgcggatatatgtgtcgataaaattgatgccgatggctttattttcgacctggatttcattctccgccggatcggcaggagtgaactctacggcttgaagtacttccgggccaccgtgcttgtgaaattcaattcgtgttgccatgtgtcctccagaacgtatcgtcagggtctgcttcatatgataaagtttcgacccattctttatctcggtaactccattcactatggcaggaaataaacccttcaacaaacagcaggctgaaccccgcgaacgcgatccacaagttgccgggctgaaagtgcctccgcacagcatcgaagcggagcagagcgtgttgggcggtttaatgctagataacgaacgctgggatgatgtagccgagcgtgtggtagcagacgatttttacacccgcccacaccgtcatatctttactgaaatggcgcgtttgcaggaaagcggtagccctatcgatctgattactcttgcggaaagcctggaacgccaggggcaactcgatagcgtcggtggttttgcttatctggcagagctgagtaaaaatacgccaagtgcggctaacatcagtgcctatgcggacatcgtgcgtgaacgtgccgttgtccgtgagatgatcagcgttgcgaatgagattgccgaagctggttttgatccgcaggggcgtaccagcgaagatctgctggatctggctgaatcccgcgtctttaaaattgccgaaagtcgtgcgaacaaagacgaagggccgaagaacatcgccgatgtgctcgacacaaccgtggcgcgtattgagcagttgtttcagcagccacacgatggcgttaccggggtaaacaccggttatgacgatctcaacaaaaaaaccgctggcttgcagccgagcgatttgatcatcgtcgccgcgcgtccgagcatgggtaaaacaacatttgcgatgaacctcgtcgaaaacgcggcgatgttgcaggataaaccggtacttatcttcagcctggagatgccaagtgaacagatcatgatgcgttctctggcgagcctgagccgcgttgaccagactaaaatccgtaccgggcagctcgatgacgaagactgggcgcgcatttccggcaccatgggtattttgctcgaaaaacgcaatatctatatcgatgactcctccggcctgacgccaacggaagtgcgttcccgcgcacgccgtattgcccgtgaacacggcggcatcgggcttatcatgatcgactacctgcaactgatgcgcgtaccggcgctttccgataaccgtacgctggaaattgcagaaatctctcgcagcctgaaagcactggcgaaagaactgaacgtgccggtggtggcgctgtcccagttgaaccgttctctggaacaacgtgccgacaaacgcccggtcaactccgacctgcgtgaatctggctctatcgagcaggatgcggacttgatcatgtttatctatcgtgatgaggtgtatcacgaaaacagtgatttaaaaggcatcgcggaaattattatcggtaaacaacgtaacggcccaatcgggacggtacgcctgacctttaacggtcaatggagccgcttcgacaactatgcggggccgcagtacgacgacgaataataattattttatgaattaggtaattaaagcaaacacttatcaaggaacacaaatgcaagcggcaactgttgtgattaaccgccgcgctctgcgacacaacctgcaacgtcttcgtgaactggcccctgccagtaaaatggttgcggtggtgaaagcgaacgcttatggtcacggtcttcttgagaccgcgcgaacgctccccgatgctgacgcctttggcgtagcccgtctcgaagaagctctgcgactgcgtgcggggggaatcaccaaacctgtactgttactcgaaggcttttttgatgccagagatctgccgacgatttctgcgcaacattttcataccgccgtgcataacgaagaacagctggctgcgctggaagaggctagcctggacgagccggttaccgtctggatgaaactcgataccggtatgcaccgtctgggcgtaaggccggaacaggctgaggcgttttatcatcgcctgacccagtgcaaaaacgttcgtcagccggtgaatatcgtcagccattttgcgcgcgcggatgaaccaaaatgtggcgcaaccgagaaacaactcgctatctttaataccttttgcgaaggcaaacctggtcaacgttccattgccgcgagcggtggcattctgctgtggccacagagccattttgactgggtgcgcccgggcatcattctttatggcgtcagcccgctggaagatcgctccaccggtgccgattttggctgtcagccagtgatgagtctaacctccagcctgattgccgtgcgtgagcataaagccggagagcctgttggttatggtggaacctgggtaagcgaacgtgatacccgtcttggcgtagtcgcgatgggctatggcgatggttatccgcgcgccgcgccgtccggtacgccagtgctggtgaacggtcgcgaagtaccgattgtcgggcgcgtggcgatggatatgatctgcgtagacttaggtccacaggcgcaggacaaagccggggatccggtcattttatggggcgaaggtttgcccgtagaacgtatcgctgaaatgacgaaagtaagcgcttacgaacttattacgcgcctgactagtagggtcgcgatgaaatacgtggattaatcgttctgtaatatttgattgtctgtgccggatgcggcgtgaatgccttatccggccaataaaatcctaaaaattcaataagttgatgttctttcatgctcttataaaggtcgtgcctctggcggatgtacgtttgtcatgagtctcactctgttgctaattgccgttcgctcctgaacatccactcgatcttcgccttcttccggtttattgtgttttaaccacctgcccgtaaacctggagaaccatcgcgtgtttcaaaaagttgacgcctacgctggcgacccgattcttacgcttatggagcgttttaaagaagaccctcgcagcgacaaagtgaatttaagtatcggtctgtactacaacgaagacggaattattccacaactgcaagccgtggcggaggcggaagcgcgcctgaatgcgcagcctcatggcgctagcctttatttaccgatggaagggcttaactgctatcgccatgccattgcgccgctgctgtttggtgcggaccatccggtactgaaacaacagcgcgtagcaaccattcaaacccttggcggctccggggcattgaaagtgggcgcggatttcctgaaacgctacttcccggaaagtggcgtctgggtcagcgatcctacctgggaaaaccacgtagcaatattcgccggggctggattcgaagtgagtacttacccctggtatgacgaagcgactaacggcgtgcgctttaatgacctgttggcgacgctgaaaacattacctgcccgcagtattgtgttgctgcatccatgttgccacaacccaacgggtgccgatctcactaatgatcagtgggatgcggtgattgaaattctcaaagcccgcgagcttattccattcctcgatattgcctatcaaggatttggtgccggtatggaagaggatgcctacgctattcgcgccattgccagcgctggattacccgctctggtgagcaatagcttcagcaaaattttctccctttacggcgagcgcgtcggcggactttctgttatgtgtgaagatgccgaagccgctggccgcgtactggggcaattgaaagcaacagttcgccgcaactactccagcccgccgaattttggtgcgcaggtggtggctgcagtgctgaatgacgaggcattgaaagccagctggctggcggaagtagaagagatgcgtactcgcattctggcaatgcgtcaggaattggtgaaggtattaagcacagagatgccagaacgcaatttcgattatctgcttaatcagcgcggcatgttcagttataccggtttaagtgccgctcaggttgaccgactacgtgaagaatttggtgtctatctcatcgccagcggtcgcatgtgtgtcgccgggttaaatacggcaaatgtacaacgtgtggcaaaggcgtttgctgcggtgatgtaatgcaggaaagcaggctggagctacccagcctgcagtgaaattaaactgtcgtcgctttcactctttctttatagatgatttttttgatgccatcgttctacgtgagagataataaacgttgttagttcttttattgttaagcttatcccaattatctggaattccttatcctgtttttttgggtggagtaataatttctgcacatctaaccattattaaatttaataataagtatcgggtttgttacgatagaatatttctatatcctcaagaatatgctttgccttattgcctgtgactttctgagattcaattatagtatcgttaaattctaatgttaaagagaactcttttttccgctttgtgtaagtttaaccttatattgattaccaatatcaaataaaaaggtcctgtaatgagaataatcacctttaacctcctcggcaaaacagcaaagcgtgcaaatatacataaagtctttcttacccctgattttgttaactaaatcaataaatgcgtgaaaaactttacttgcaatagaacttgatacttcttctccaggtctaaaaaatcttttgcaatttttaactgtgtttctatgtataaaaagaaatctttggcataagagatatctttattatttagtgcatctagctcaacaggtaaagatgtcgttttgttgctattcacatatgatatattcatatcatcatctccatcgcgagtaataaaattaatcaccattgtagggtagggggctggtcaatcagaaatcatctttataaacttcgattgtttttgtaatgctgtatcattaagttcattaaatcgtacagcagataaatgttctatcaaatttcgctcatttgccgaggattcatcataataaacgtaaaattaatgtatccttacatcgagtaataaacattttttatacaaaaaaagacaggaacgtatttactgggttaaatataatcatcctgcttttcatcacaaaaaccgcagataatccttcctttccccggcagctggcgttatggtcagatggtttttgcaacaaatctcacaataaaaagtttcaacatactgactatttagggaaaaatatgcgcaagatcacacaggcaatcagtgccgtttgcttattgttcgctctaaacagttccgctgttgccctggccagttctcctagtccgcttaaccctgggactaacgttgccaggcttgctgaacaggcacccattcattgggttagcgtcgcacaaattgaaaatagcctcgcagggcgtccgccaatggcggtggggtttgatatcgatgacacggtacttttttccagtccgggcttctggcgcggcaaaaaaaccttcagcccagaaagcgaagattatctgaaaaatcctgtgttctgggaaaaaatgaacaatggctgggatgaattcagcattccaaaagaggtcgctcgccagctgattgatatgcatgtacgccgcggtgacgcgatcttctttgtgactggtcgtagcccgacgaaaacagaaacggttagtaaaacgctggcggataattttcatattcctgccaccaacatgaatccggtgatctttgcgggcgataaaccagggcaaaatacaaaaagccaatggctgcaggataaaaatatccgaattttttatggcgattctgataatgatattaccgccgcacgcgatgtcggcgctcgtggtatccgcattctgcgcgcctccaactctacctacaaacccttgccacaagcgggtgcgtttggtgaagaggtgatcgtcaatagtgaatactgacagagcgggagagcgtgatgctctcccgaatgctgtttttttaatcacacctttatcctttcgctgtcttgctgcaaactgattaagagagttttatcaaggagcagcacatgtggtatcaaaagacgctcacgcttagcgccaaatctcgtgggtttcatctggtaacggatgaaattctgaatcagctggctgatatgccgcgcgttaacatcggcttactgcatctgttgctgcaacatacctccgcctctctgacacttaatgagaactgcgatcccaccgtacgccacgacatggagcgttttttcctccgcaccgttcccgacaacggaaattatgagcatgactatgagggagcagacgatatgccttctcatatcaaatccagtatgctgggaacaagccttgtattgccggtgcataaagggcgtattcagaccggcacctggcaaggcatttggctgggggaacatcgcatccacggcggaagccgtcgcatcatcgcgacactacaaggggagtaaaaaatgaccattagcgagttgctacaatattgcatggcaaaaccaggcgcagaacagagcgtgcataatgactggaaagcgacgcagatcaaagtggaagatgtactgtttgcgatggtgaaagaagtagaaaatcgcccagctgttagcctgaaaaccagcccggagctggcggagctgctacgtcagcagcacagcgatgtgcgtccaagccgccatctgaataaagcgcactggagcaccgtgtatctcgacggtagcctgccagatagccaaatctattatctggtggatgcgtcttatcagcaggcggtgaatttactgccggaagaaaaacgtaaattgctggtgcaactctgaaaggaaaaggccgctcagaaagcggccttaacgattacagcatcggcttaaggaagcgtgccgtgtgacttgcttcgcactccgcgacggtttctggcgtaccggagacgaggatctcgccgccaccactgccgccttctggtcccaggtcgacaatccagtcagcggttttgatcacgtcgagattgtgctcaatcaccacaatggtgttgccctgatcgcgcagtttatgcagtacgtcgagcagttgctgaatatcggcgaagtgcagaccggtggtcggctcgtcgagaatatacagcgtctgcccggtgccgcgtttactcagttcacgcgccagcttcacgcgctgggcttcaccgccactaagggtggttgcggactgccccagtcgaatgtacgtcaggccaacgtccatcaacgtttgcagcttacgcgccagtgcaggtacggcatcaaagaactcacgcgcctcttcgatggtcatatccagcacttcgtggatggttttgcctttgtacttaatctccagcgtttcacggttatagcgtttacctttgcactggtcgcacggcacgtagatatccggcaggaagtgcatctccactttgatcacgccatcgccctgacaggcctcgcagcgtccgccacgaacgttaaagctgaaacgtcccggcgtatagccgcgcgcacgggattccggtacgcccgcaaacagttcgcgcacaggcgtaaacacgccggtataggtcgccgggttagaacgtggagtacgaccaattgggctttggtcgatatcgatcactttatcgaaatgctccagcccctgaatatcgcgatacggtgctggttcggcgatggtcgccccattcaactggcgttgggcaatcgggaacagtgtgtcgttaatcagcgtgcttttaccggaaccactaaccccggtgatgcaggtaaacagacccaccggcagcgtcagcgtcacgtccttcaggttgttgccgcgtgcgcctgtcagcttcagcactttttccggattcgccggaacgcgtttcttcggcacttcaatcttgcgtttgccgctcatgtactgcccggtcaagctctccggcaccgccataatcgcttccagcggaccttctgcgaccacttcaccgccgtgaacacctgcgcccgggccaatgtcgatcacatggtcagcggcgcgaattgcgtcttcgtcgtgctccaccacaatcacggtattaccgagatcgcgcagatggataagcgtacccaacaggcgctcgttatcacgctggtgcaggccgatagacggctcgtccagcacgtacataacgccaaccaggcccgcaccaatctggctcgccagacggatacgctgtgcttcaccgccagaaagcgtttctgcgctgcgggaaagcgtcaggtaattcaggccgacgttaacgaggaatttcagacgatcgccgatctctttaaggattttttctgcaatcttcgcccgctgacctgcgagtttgagattgttgaagaattccatcgcatgaccaatgctcatgtcggagatagcaggcagcggcgtattctcgacatacacgtggcgcgcttcccgacgcagacgcgtcccttcgcagctggcgcacggacgattactgataaacttggctaattcttcgcgtaccgcgctggattccgtctctttatagcggcgctccatattatgcagcacgccttcgaacggatgacgacgaatggaggtatcgccacgatcgttcatgtatttgaattcaatgttttctttgccagaaccgtacaacaccactttatgcacgttcgcgctcaggctgccccacggcgcttcgacgtcgaacttatagtgatctgccaggcttttcagcatctggaaataatagaagttgcggcgatcccagccacggatcgcaccaccagccaggctcagttccggattctggatcactcgatcaggatcgaaatattgctgtacgccaaggccgtcgcaggtcgggcaggcccccgccgggttgttaaagctaaacagtcgcggctccagttcacgcatactgtagccgcaaattgggcaggcgaagttggcggagaacagcagctcttccgctttcgggtcgtccatatccgccactaccgcggtaccaccggaaagctccagcgcggtttcaaaactctcggcaagacgttgggtaagatcgtcacgcaccttgaagcgatcaaccaccacttcaatggtatgtttcttttgcagttccagttttggcggatcggaaagatcgcagacttcgccatcaatacgagcacggatgtagccctggcttgccaggttctccagcgttttggtgtgttcgcctttgcgctctttaatgattggcgcgagtagcatcagacgcttgccttccggctggctcagcacgttatccaccatctggctgacggtttgcgccgccagcgggacgtcgtggtccggacagcgcggctcgccaacgcgggcgaataacaaacgcaaatagtcgtggatttcggtgattgtccccaccgtagaacgcgggttatgagacgtgcttttctgctcaatactgatggcaggagaaagcccctcaatatgatcgacgtccggcttttccatcagactcagaaactgccgcgcgtaggcggaaagggattcaacgtaacggcgctgcccttcggcatataaggtgtcgaaagcgaggctggatttgccagaaccgctaagcccggtcacgacaatgagcttgtcgcgggggataacgaggttgatgtttttgagattatgggtgcgggcgccccgaacttcgatcttatccattcacctttcccggattaaacgcttttttgcccggtggcatggtgctaccggcgatcacaaacggttaattatgacacaaattgacctgaatgaatatacagtattggaatgcattacccggagtgttgtgtaacaatgtctggccaggtttgtttcccggaaccgaggtcacaacatagtaaaagcgctattggtaatggtacaatcgcgcgtttacacttattcagaacgatttttttcaggagacacgaacatggccagcagaggcgtaaacaaggttattctcgttggtaatctgggtcaggacccggaagtacgctacatgccaaatggtggcgcagttgccaacattacgctggctacttccgaatcctggcgtgataaagcgaccggcgagatgaaagaacagactgaatggcaccgcgttgtgctgttcggcaaactggcagaagtggcgagcgaatatctgcgtaaaggttctcaggtttatatcgaaggtcagctgcgtacccgtaaatggaccgatcaatccggtcaggatcgctacaccacagaagtcgtggtgaacgttggcggcaccatgcagatgctgggtggtcgtcagggtggtggcgctccggcaggtggcaatatcggtggtggtcagccgcagggcggttggggtcagcctcagcagccgcagggtggcaatcagttcagcggcggcgcgcagtctcgcccgcagcagtccgctccggcagcgccgtctaacgagccgccgatggactttgatgatgacattccgttctgatttgtcattaaaacaataggttatattgttttaaggtggatgattaaagcatctgccagccataaaaaagaagcctccgttatggaggcttctacgtatcaggtcaaaatcattggccattgtggcggtgtctgattcatctcttctatcatcacgctctcgatgttgtgccagatagcggtgatgtccgccattgtgatgccaagcaaccccattgcgaaccaacaggcggaaacaacgcccagaccgctgctgatcaccgcaagcccgacataatcagaccgacgaaaacggatgttgagtgtgctggccagaaacatcattacggcactaagaagttgccagcgaagaagaaccacgccagtggtgagggtagccatcaaacaattcctctgaaaagagccgatgccctggacagcgcggcgttgttcacgggaggcgtggtacactctggctatcgcggggcttgcagaacacaaaaatgaaacactctgtttgtttcattaattttgtgaactatatcacaattgattgtttgttagccatattaggccgtgacttttattgctgtacagattatgtggtttttcagtggcattaagggcatatcttcccgccgcctctgcattcctgtaggaaattaattttgaatatcaatgaattattttcatccaggtgacgattagaaaggtatcaatttcaaatcaggcaaaagtgctatttataccgtaagatttatctaaagacgtcggtacccagggttttcaccttgcaatggccgggtataaacaggcaggaaattgatagcaatgagtcatcgtgcacgacaccaattactggcgttgccgggcattatctttttagttctctttcccatcattcttagcctatggattgccttcctttgggcaaaaagtgaagtgaataatcagctccgaacctttgctcaactggcactggataaatccgagctggtcattcgccaggcagatttagtgagcgatgcagctgaacgctatcaggggcaagtttgcactccagcccatcaaaagcgaatgttgaatattattcgtggctatctttatattaatgaattgatctatgcccgtgataaccattttttatgcagtagcctgatagcgcctgtaaacggctatacgattgcaccggccgattataagcgtgaacctaacgtttctatctattattaccgcgatacgccttttttctctggctataaaatgacctatatgcagcggggaaattatgtggcggttatcaaccctctcttctggagtgaagtgatgtctgatgacccgacattgcaatggggtgtgtatgatacggtgacgaaaacctttttcagcttaagcaaagaggccagcgcagcaacgttttctccgctgattcatttgaaggatttaaccgtacaaagaaatggctatttatatgcgacagtttatagcacaaaacgcccaattgcagccattgttgcgactagttatcaacgtcttataacccatttttataatcatcttatttttgcgttgcccgccggtattttggggagtcttgttctgctattactctggctacgtattcgacaaaactatttatctcccaaacgtaaattgcaacgcgccctcgaaaaacatcaactttgtctttattaccagccaataatcgatatcaaaacagaaaaatgtatcggcgctgaagcgttgttacgttggcctggtgagcaggggcaaataatgaatccggcagagtttattccgctggcagaaaaggaggggatgatagaacagataactgattatgttattgataatgtcttccgcgatctgggcgattacctggcaacacatgcagatcgctatgtttctattaacctgagcgcctccgattttcatacgagtcggttgatagcgcgaatcaatcagaaaacagagcaatacgcggtgcgtccgcagcaaattaaatttgaagtgactgagcatgcatttcttgatgttgacaaaatgacgccgattattctggctttccgccaggcaggttacgaagtggcaattgatgattttggtattggctactctaacttgcataaccttaaaagtttgaatgtcgatattttgaaaatcgacaaaagctttgttgaaacgctgaccacccacaaaaccagtcatttgattgcggaacacatcatcgagctggcgcacagcctggggttaaaaacgatcgctgaaggcgtcgaaactgaggagcaggttaactggctgcgcaaacgcggcgtgcgctattgccagggatggttctttgcgaaggcgatgccgccgcaggtgtttatgcaatggatggagcaattacccgcgcgggagttaacgcgcgggcaataaaattacaggcggtggcgataatcgctgggagtgcgatcaaactgccgacggaaaacgcgggagaaggtctgctggctgacataacccaggtccattgcgatatcaaaaatcggacgctcggtggtgcgcaactcaacggcggccagtaacaggcggcgttggcgaatgtaatcgccaagcgtctgatgcgtcaccgtgcggaacattcgttgcaagtaccacttactatagccacttttttttgcgactacatcaatgttaagcggctggtcaatatgctcgtcaatccatgcgataagatcctgaataattttctgatgggacataaatctgcctcttttcagtgttcagttcgttaattcatctgttggggagtataattcctcaagttaacttgaggtaaagcgatttatggaaaagaaattaccccgcattaaagcgctgctaacccccggcgaagtggcgaaacgcagcggtgtggcggtaagcgcgctgcatttctatgaaagtaaagggttgattaccagtatccgtaacagcggcaatcagcggcgatataaacgtgatgtgttgcgatatgttgcaattatcaaaattgctcagcgtattggcattccgctggcgaccattggtgaagcgtttggcgtgttgcccgaagggcatacgttaagtgcgaaagagtggaaacagcttagctcccaatggcgagaagagttggatcggcgcattcataccttagtggcgctgcgtgacgaactggacggatgtattggttgtggctgccttagccgcagtgattgcccgttgcgtaacccgggcgaccgcttaggagaagaaggtaccggcgcacgcttgctggaagatgaacaaaactaaagcgccacaagggcgctttagtttgttttccggtctttgtctttctctctatcccgctggtacacaggagggtttcccccgacgtcaacacacctcattcgagcacgtggtggaggttccggttggtgttgatgctttaattgtatgtcaccgacgtttcttcgccagtgtaaaagtatactttttaaccgcaatatttttgtcatctcagacgattttttatcgcaatcctgaacggtatacggctcgataacgctgcaatcttgcgcaccgacgataacgtttgcgcatcaattgcctggtttttcatcgtcaagacaataaaagagaaaaaagcagcaaacttcggttgaaaaagccgctatgatcgccggataatcgtttgctttttttaccacccgttttgtatgcgcggagctaaacgtttgcttttttgcgacgcagcaaattgtcgcaaacctggagcaggaagataacgtttcgctggcaggggattgtccgccacgcatcttgacgaaaattaaactctcaggggatgttttcttatgtctacgccaagtgcgcgtaccggcggtagtctcgacgcctggtttaaaattagtcaacgtggaagcactgtccgtcaggaagtggttgccgggttaacaacgtttctggcgatggtctacagcgtcatcgtcgttccaggtatgttgggtaaagcaggcttcccgcctgcggcagttttcgttgcaacctgtctggttgccggactcggttctatcgtgatgggtctgtgggctaatctgccgttggcgattggttgcgccatctccctgacagcgtttaccgcattcagcctggtgctggggcaacatattagcgtacctgtcgcgctgggtgccgtgttcctgatgggtgtgctgtttacggtaatttctgccacgggtatccgtagctggattttgcgcaacttgcctcacggtgtggcgcacggcacggggattggtatcggtctgttcctgctgctcattgccgctaacggtgtcggtctggtgattaaaaacccgcttgatggtctgcccgttgcgctgggtgatttcgcgaccttcccggtgattatgagtctggtaggtctggcggtgatcatcggcctggaaaaactgaaagtccctggtggcattctgctgaccattatcggtatcagtattgtcggtttgatcttcgatcctaacgtccatttctccggcgttttcgccatgcctagtttgagcgatgaaaacggcaatagtctgattggcagcctggacattatgggcgcgctgaatcctgtagtcctgccaagcgttctggcgctggtgatgacggcagtatttgatgccaccggaactatccgtgccgtcgccggccaggcgaacctgctggataaagatgggcagatcatcgacggtgggaaagcactgaccactgactccatgagcagcgttttctctggcctggtgggtgcggctccggcagcggtatacatcgagtctgcggcgggtacggcggcgggcggtaaaaccggtttgacggctatcaccgttggcgtgctgttcctcctgattctgttcctctctccgctctcttacctcgttccggggtatgcaacggctccggcgctgatgtacgttggcctgctgatgctgagcaacgtggcgaaaatcgactttgctgattttgttgatgcgatggcgggtctggttacggctgtattcatcgtgctgacctgtaacatcgtaacaggcatcatgatcggcttcgcgactctggtgattggtcgtctggtttccggcgaatggcgcaagttgaacatcggtacggtcgttatcgccgtggcgctggtgaccttctatgcgggtggctgggctatctaatctttcatcggattctgaaaacgggtggcaatggctgcccgtttttattttctccgcacattgtgtgagcttttgcgatattctgaaaaaaatgagaattcaggcataacgtctttctcagatcataaaaaacatcgcaaacagggaacgcatggaaatcttcttcaccatactgataatgaccctcgtggtcagcctgtccggggtggtcactcgtgtcatgccctttcagatcccgcttccgcttatgcaaatcgccatcggtgcgctactggcgtggccgacgtttggtttgcatgtggagtttgatcctgaactctttttagtcttgtttatcccgccgttgctgttcgctgatggctggaaaacgccgacccgtgaatttctcgaacatggtcgagagattttcggcctcgcgctggcgctggtggtggtcaccgtggtcggcattggcttccttatttactgggtggtgccgggcattccgctgatccctgcctttgcgctggcggcggtgctttctccgaccgatgctgtggcgctctccgggattgttggcgaagggcgcatcccgaaaaaaatcatgggcattttgcagggcgaagcgttgatgaatgacgcctccggtctggtgagcttgaagtttgccgtagcagtggcgatggggacgatgatcttcaccgtcggcggtgcgacggtcgaatttatgaaagtagccattggcggtattctcgccggttttgtggtgagctggctgtacggtcgcagcctgcgattcctcagccgctggggcggtgatgaacccgcgacgcagatcgtcctgctgttcctgctgccattcgcttcttatctgattgccgaacatattggcgtttccggcatcctcgctgcggttgccgccgggatgaccatcacccgctccggtgtgatgcgccgtgcgccgctggcaatgcgcctgcgtgcaaacagcacctgggcgatgctggaatttgtctttaacggcatggtgttcctgctgttaggtctgcagctgccgggtattctggagacgagcctgatggcagcagaaatcgaccctaacgtcgaaatctggatgctgtttaccaatattattctgatatatgcggcgctgatgctggtccgtttcggctggctgtggacgatgaaaaagttcagcaaccgcttcctgaagaagaagccgatggagtttggtagctggaccacacgagaaatcctgatcgcgtctttcgccggggtgcgtggggcgatcactctggccggtgtgctctctatcccgctgctcttgccggatggtaacgtcttcccggcgcgctatgagctggtgttcctggcggctggcgtcattctcttcagcctgtttgtcggcgtggtgatgttgcctattctgctacaacacattgaagtcgcggatcatagccaacaattgaaagaggaacgtattgcgcgagcggcaacggcagaagtggcgattgtggcgatccagaaaatggaggagcgtctggcggcggataccgaagagaatatcgataaccagctgcttacggaggtcagttctcgcgtcattggtaacctgcgtcgtcgcgccgatggacgtaacgacgttgaaagttccgtgcaggaagagaaccttgagcgtcgcttccgtctggcggcattgcgttctgaacgtgctgaactttaccacctgcgcgccacacgggagatcagcaacgaaacgctgcaaaaattactgcacgatctcgatttgcttgaagcgttgctaattgaggaaaatcagtaagccgaaagcgacgtaaccaggcccgaggtaatctgaaaaaggtgcaatcttttgcacctttaacaggttagctcgggctaacattcatgattctaaaacaaataaattatctctcttttaaagtcaattcattggctgttcttcgacttaacctcaatctgcatcttgcataatatctgcagtaatcttcatagcgactgcatgaagattatcctcagtttgactcatgccagtatgagtggcacaatcttcttcaaagaatttctgtagtgttaccaggatatcactattaatggagatattttcctcaccacggagaatggtaatacccattccctggacgctagcctcatcgaaattaacacgatagagacggatattaaacatccaggcttttgttaaaacagaacagttgaaatggcaattgcttaaattggcattattaaaattaacattagccatattagagtcggtacatataaccatttcgaggaacgtatttgttaaccgcgtaaaaaagagtttgctatcaattaagtttatattctggagggttgctttattcaggttgacacgagacagatcagcatgttcaaagttaattaaatcaagtttagagaagctaaggtcggctctaaataaattaatatatggcgctattactttataaagatttacctcagccatgtatgccatataaaaattactataatcaaggaaggtatttttaatattggctctattcattgttgcattgtagaattgaacatgcatagcggaacaactatttagagttccgtcagtcatttttatctgagcgaaattactgtcatcgagaatacaattatcaaaaagtattttttccattatggcgaaattaaaattcgttttatacatattacagtcctgaaaaatagcgttttgtagtctgcaacctgcaaaattgctattggataaatcttcatctttaatcacgatacctttcaggctaaggtgactaaaatcgtaaccaccatttactgtctgtgggatttcgatagtattattatggacggtgacattatttataaaatataccaccttaatactcacttccttatctttattaaggtaaactcttctcgtaattctatcgtcacatttattatttgcatgactagctatatctataaaatatttatgtattttcctgtccgtttctttcgtgatttttccacttggtaaactatcataaattcttttcattttctgaatcaagcctatcactttttcatgatcatccattttgaaaagagagagggctttattgtcaattaacgtgtttttatgatgtttgctgtaattatcactttttgttttctttgtatgacttggacttgtgacagagtggttatcgttaatcaggcaaagagggaaaaacatattatttaaaccattatagcgcataaaatatccttataattaacaagaaagaaaaggcatattctctgcattatcattttctacgactgtcaaaaatcgctcattttttaatgagtttatttgtttaatattatgggaaaaggtgatgcatttgggagaggaagagtattccccggtcagacgaccggggaaggggagagattaatgcgcgcggccttgctcaacgccaaagccggtctgggagcggataaactgcgcgcggaacagttcacgctcacgcgcgccttccgcactgttatcggttgcgctgaagaaccagatgccgaggaatgccacggtgatagagaacagcgccgggtattcatacgggaagatggctttttcgtgaccaaggatctgtacccaaatcgtcgggccgaggatcatcagtactactgcggtaatcagccccagccagccacccatcatcgcgccacgcgtggtcagtttgctccagtacatagaaagcagaatgatcgggaagttacagctcgccgcgatggcaaacgccagccccaccataaaggcgatgttctgattctcaaacagcacgccgaggataatcgcaatcacgccgaggatcagtacggtgattttacttacccgcagctcttcacgttcggtcgcgccttttttgaagacgttagcgtacaagtcatggctaaccgcggatgcgcccgccagcgtcagacccgcaaccaccgcgaggatagtggcgaaagcaaccgcactaataaaaccgaggaacaggttgccgcccactgcattcgccaggtgaacggccgccatgttgttaccaccaatcagatggcccgccgcgtctttatattccggattcgcaccaaccagcatgatcgcgccgaagccgataataaaggtcagaatatagaagtagcccataaacccggtggcgtagaacacgctcttacgtgcttcgcgggcatcgctgactgtaaagaagcgcatcagaatgtgcggcaagcccgccgtaccaaacatcagtcccagacccagagagagcgcggagatcggatctttcaccagcccgcccggcttcatgatgtcgacacctttcgggtgtaccgccatcgcttcactgaacagattgttgaagctaaagccgacgtgtttcatcaccataaaggccataaagctggcaccgaacagcaacagcacggctttgataatttgcacccaggtggtcgccagcatgccgccgaacaggacgtacatcatcatcagcacgccgaccagcaccaccgcaatgtgatagttaaggccaaacagcagctcgatcagtttacctgcgcccaccatctgggcgataaggtaaagcgccaccaccaccagagaaccacaggcgctaagaatacgaatcggcccttgtttcagacggtaagaggccacatcggcaaaggtgtagcgccccaggttacgcagacgttcggcaatcaggaacaaaatgatcggccagcccaccaggaagcccaggctgtaaattaagccgtcatagccggaggtaaacaccagcgcggagatccccaagaaactggcggcggacatatagtccccggcaatcgccagcccgttctggaagccagtgatattgccgcctgcggtgtagtagtcgctacgagaacgtacgcgtttacttgcccagtaggtaatgccgagcgtaaacacgacgaaaatcaggaacataataatcgcctgccagttcgttggctggcgctctacggccccgctaatagcatccgcggcgttagctgcgaaagggagtgtggcggcaagcgccgtcagaactcttttcatgatgcttgtacctcatgcagttatttcaacttgcttgtacctcatgcaggacttcattattaagacggtcgaattcgccgttcgcccgccagatgtagataccggtgagaacaaaggagatcacaatcactccaacaccaattggaataccgcgtgtgacgctggtgttcggattcagcggcgtgcccagccagccgggcgcgaaggcgatcagtaaaataaagccgatataaactgccagcataataatgctcaggatggtggcaaaccgttgccgtttttcgactaactccctgaaatgcgcattgtcttctatccgctgataaatagtgccattcatcacagattctccagaggtaatgtagggattgttttaattcccgctcccttatgggagaaggttaacgctcgggtaacccttgccgaatgtaggccggataaggcgtttacgccgcatccggcaatcaatgcctgatgcgacgctgtcgcgtcttatcaggcctacaaaccgttaccgactcgcatcgggcaattgtgggttagcttggcatcgcgatagcctgcttctcttcaagcagcttctcgactacgccaggatcggcaagcgtgctggtatcgcccaggttgctggtatcgcccgccgcaattttgcgcagaatacggcgcataattttgccggagcgggttttaggcagggagtcggtccagtgcagcacgtctggcgtcgccagcgggccaatctctttacgcacccagttgcggacttctgcgtacagttctggactcggttcctccccgtgattaagcgtgacgtaggcgtagatcgcctgacctttaatattgtgcggaatacctactacggcggcttcggcaatcttcggatgcgccaccagcgcgctctcaatctctgccgtccccagacggtgaccggagacgttcagcacgtcgtccacacgcccggttatccagtaatagccatcttcatcgcgacgcgcgccgtcgccgctgaaatacatatttttgaaggtggagaagtaggtctgttcaaaacgttcgtgatcgccaaacagcgtacgcgcctgacccggccaggagtcggtgattaccaggctaccttcggtggccccctccagcgggttaccttcgttatcgaccagcgccggttgcacgccgaagaacggacgtgttgcgctaccggctttcagctcggtagcgccaggcagcggggtgatcatgaaaccgccggtttcggtctgccaccaggtatcgaccaccggacatttctcgttgccgatttttttccagtaccactcccacgcttccgggttaattggctcgcccacggaaccgagaatgcgcaggctgctacggtcggtgccttcgatcgctttatcgccttccgccatcagcgcgcggatcgccgtgggtgcggtatagagaatattgacctgatgcttgtccaccacctgcgccatacgggcaggcgtcggccagttgggtacgccttcaaacatcagcgtggtcgcaccgcaggccagcgggccgtacagcaagtaactgtgtccggtcacccagcccacatcggcggtgcaccagtagatatcacccggatgataatcaaagacatatttaaaggtcagcgccgcgtacaccagataaccgccggtagtatgcagcacaccttttggcttaccggtagaaccggaggtgtagagaataaacagcggatcttcggcgttcatctcttccgcctggtgctgatcgctcgcttgctcaaccaggtcgtgccaccacaggtcgcgcccttcctgccagtcaattttcccgccagtacgcttcagtaccaccacatgctctacgctggtgacgttcgggtttttcagcgcgtcatcaacgtttttcttcagcggaatactgcgcccggcacgcacaccttcgtcggaagtgatcaccagtcgactgttggaatcaataatgcgcccggcaacggcttccgggctgaagccgccgaaaatcacgctatgcaccgcgccaatgcgggcgcaggccagcatcgcaaccgcggcttccggcaccatcggcatataaatcgccaccacatcaccttttttaatgcccagctcgagcagggtattggcgaagcggcagacgtcgcggtgcagctctttatagctgatatgtttgctctggctggcgtcgtcgccttcccagatgatggcggtacgatcgccgttttcttgcagatggcggtcaaggcagtttgccgccagattcagcgtgccgtcctcgtaccatttaatggacacattaccgggggcaaaggaggtgtttttcaccttctggtaaggtttgatccagtcaagaatttttccctgttcgccccagaaggtatcaggtacgttaatagattgttgatacatcgcctcgtactgctgagggtttatcaggcaacggtctgcgatgttggcaggaatggtgtgtttgtgaatttggctcatgcttttgttctccttgtaggatgttaataatatgtggcataagcgttaaatgtaggggtattggcagttttgtttagtatttgggcgacagatcacgcaaaagtagaattgtgcaaataaacggcagggtaatttttgaaggtcagcaacaaaagttgattaattctttgaggaacatgcagttatgcatgctgttgaaaaagaggaagatactgactaactctaaagtggtattttacatgcacttacaattgattaaagacaacattcacagtgtggttatttgttacacataggggcgagcaatgtcatgacagtgtaggtgcggttactgtcgtgaaaaacaataaaaaccgccattgcaacaatggcgcaattcggatgaagcccctatgacaaggataaaaataaacgcacgccgtatcttcagcttattgattccttttttctttttcacttctgttcacgctgaacaaacggctgctcccgcaaaacctgtaactgtggaagcgaagaatgaaacctttgccccgcagcatcccgatcaatatctctcctggaaagccaccagcgaacagagtgagcgtgttgacgccctggcggaagatccacggctggtgatcctgtgggcggggtatcccttcagccgcgattacaacaagccgcgtggacatgcttttgctgtgaccgatgtgcgtgaaaccctgcgtaccggtgcgccgaaaaacgctgaagatggtccgctaccgatggcatgctggagttgtaaaagcccggatgtggcgcgtctgatccagaaagacggcgaagatggctacttccacggtaaatgggcgcgcggcggtccggaaatcgtcaacaacttaggttgtgccgattgccataacaccgcctctccagagttcgccaaaggcaaaccggagttaaccctttcccgtccgtatgcggctcgcgcgatggaagccattggtaaaccttttgagaaagccggacgtttcgaccagcaaagcatggtttgcggtcagtgccatgtggagtattacttcgacggcaaaaacaaagcggttaaattcccgtgggatgacggcatgaaagtcgaaaatatggagcagtattacgacaaaattgccttctctgactggactaactccctgagcaaaacgccaatgctgaaagcgcagcacccggaatatgaaacctggacagcgggcattcacggtaaaaacaacgtgacctgtatcgactgccatatgccaaaagtgcagaacgccgaaggcaaactctacaccgaccataaaattggtaatccgtttgataacttcgcccagacttgtgcgaactgccatacccaggacaaagctgccttgcaaaaagtggtcgcggaacgtaagcagagcattaacgacctgaaaatcaaggttgaagatcaactggttcacgctcacttcgaagcgaaagcagcgctggatgcaggcgcgacggaagctgaaatgaagccaattcaggacgatatccgtcatgcccagtggcgctgggatctggcgatcgcttcccacggcattcatatgcacgcaccggaagaaggtttacggatgctcggtacggcgatggataaagcggcggatgcacgcaccaaactggcgcgcctgctggcgaccaaaggcatcacccatgaaatccagatcccggatatcagtaccaaagagaaagcccagcaggccattggcctgaacatggaacaaatcaaggccgagaagcaggacttcatcaaaacggtgatcccgcagtgggaagaacaggcacgtaaaaacggtctgttaagccaataaccccgttccgcctcgcaaggggcggaaaacacaatggagtgaatatgagcgtattacgtagcttattaactgccggggtgctggcgagcggcctgttgtggagcctgaacggaattaccgctacccctgcggcgcaggcatctgatgatcgctacgaagttacccagcagcgtaacccggatgccgcctgtctggactgtcataaaccagataccgaaggtatgcatggaaaacatgcttccgttatcaacccgaataacaaactgccggtcacctgcaccaactgtcacggccagccaagtccgcaacaccgcgaaggggtgaaagatgtgatgcgctttaacgagccgatgtacaaggttggagagcagaacagcgtctgtatgtcctgtcatctgccggaacagttgcaaaaagcgttctggccgcacgatgtccacgtaaccaaagtggcgtgcgccagctgccattccctgcatccacagcaagatacgatgcagacgttaagtgacaaaggacggattaagatttgcgtcgattgccacagcgatcagcgcaccaatccgaactttaacccggcgtctgttccgttgcttaaggagcagccatgacctggtctcgtcgccagtttctcaccggcgtcggcgtgctggcagccgtcagcggcaccgcagggcgcgtggtggcgaaaacgttgaatatcaatggggtgcgttacggcatggtgcatgacgagagcttatgcatcggctgtaccgcctgtatggatgcttgtcgggaagtgaacaaggtgccggaaggcgtcagccgcctgacgattattcgtagcgagccgcagggcgaatttcctgatgtgaaatatcgcttcttccgtaagtcttgccagcactgcgatcatgcgccgtgcgttgacgtctgcccgaccggtgcgtcttttcgcgatgctgccagtgggattgtcgatgttaatccggatctctgcgtcggttgtcagtactgcatcgccgcctgtccgtaccgcgtgcgctttatccatccggtcacgaagacggcggacaaatgcgatttctgccgtaagaccaatttgcaggccggtaagttgcccgcgtgcgttgaagcttgcccgaccaaggcgctgacgtttggcaatctggacgatcccaacagtgagattagccaactgctgcgccagaagcccacttaccgctacaagctggcgctgggaaccaaaccgaagctgtaccgcgtaccgtttaaatacggggaggtgagccaatgacgcagacttccgcatttcattttgaaagcctggtgtgggactggccgattgccatctacctgtttttgattggtatttctgctggtctggtgacgctggccgtgctgttacgtcgcttctacccgcaggcgggcggtgcagacagtacgttgctgcgcaccacgctgattgtcgggccgggcgcggtgatcctcggtctgttgatcctcgtcttccacctgacaagaccgtggaccttctggaagctgatgttccactacagttttaccagcgtgatgagcatgggggtgatgctgtttcagctctacatggtggtgctggtgctgtggctggcgaaaatctttgaacatgatttgcttgccctgcaacaacgctggttgccgaagctggggatcgtgcaaaaggttctgagcctgctgacgcccgttcatcgcggactggaaacattgatgctggtgctggcggtgttgttgggggcttataccggctttctgctgagcgcgctgaaaagctatccgttcctcaataacccgatcctgccggtgctgttcctcttctccggcatcagctccggtgcggcggtggcgctgatcgccatggcgatacgccaacgcagtaacccgcattccacggaagcgcagtttgtacaccgtatggaaatccctgtggtatggggtgaaatcttcctgctggtggcgttttttgtcggtctggcgctgggcgatgacggtaaagttcgtgcgctggtggcggcattaggtggcggtttctggacgtggtggttctggcttggtgtcgccgggctggggctgattgtgccaatgctgctcaaaccgtgggtcaatcgcagttccggcattcctgccgtgctggcggcgtgtggggccagtctggtcggcgtgttgatgctgcgctttttcattctctacgccggacagttgacggtggcgtaagccagaaaagaggtggtttctggacgtattccttcctgaagtcggttttctggcgttgttgttaagtctcggggtcaacgtgttgaccccgttgacggccttcgcgggagtgcggttgcgctggcctgccatgatgcgactcacttgcatcggcattctggcgcagttcgcgctcctgctgctcgcctttggcgtactgacgtattgttttctcatcagcgatttcagcgtcatttatgtcgcgcaacatagctatagcctgctgagctgggaactcaagctggcagcggtgtggggcggccatgaaggtagcctgctgctttgggtgctgctgctttccgcctggagcgcgctgtttgcctggcattatcggcagcaaaccgatccgctatttccgctgacgttagccgttttatctctcatgctcgccgcactgctactgtttgtggtgctgtggtccgatcccttcgtgcggatatttccaccagcaatcgaaggccgcgatctcaatccgatgctgcaacatcccggtcttatctttcatccaccgctgctttaccttggctatggcggtttgatggtagcggcgagcgtggcgctggcgagtctactgcgcggcgagtttgatggtgcctgcgcccgaatttgctggcgctgggcgttacctggctggagtgcattaacggcggggatcatcctcggttcctggtgggcctactgcgaactcggctggggcggctggtggttctgggatccggtggaaaacgcctctttattaccctggctttctgccactgcgctgctgcacagtttgtccctgacacgccagcgggggattttttgccactggagcctgttgctggcgatagttactctgatgctgagcctgctgggcaccttaattgtccgttctggcattctggttagcgttcatgcgttcgcgctggataacgtccgcgccgtgccgttgttcagcctgtttgcactgattagccttgcgtctctggctctgtatggctggcgagcgcgggacggtggcccggcggtgcattttagcgggttaagccgggaaatgttaatcctcgctacgctgttgctgttttgcgcagtgctactgatcgtgctggtgggaacgctttatccgatgatttacggcctgctgggctggggacgcctctccgttggcgcgccgtattttaaccgcgcgacgttaccgtttggtctgttgatgctggtggtgattgtgctggcgacgtttgtctctggcaaacgcgtgcagcttccggcgctggtagctcatgcgggcgtgctgttatttgccgctggggtcgtggtctccagcgtcagccgtcaggagatcagcctgaatttacagccgggtcagcaggtgacgctggcaggatacaccttccgttttgagtgcctcgatctacaagccaaaggcaattacaccagcgaaaaagcgatagtggcactgtttgaccatcagcaacgcattggtgaactgacgccggagcggcgtttttatgaagcacgccgtcaacaaatgatggaaccgagtattcgctggaacggcatccatgactggtatgcggtcatgggggagaaaactgggccggatcgttacgcttttcgtttgtatgtacaaagcggtgtgcgctggatctgggggggaggattgttgatgattgcgggcgcattgttaagcggatggcgggggaagaagcgcgatgaataaagggcttctcacgctactgctgttatttacctgttttgcgcacgctcaggtcgtagacacctggcaattcgccaatccgcaacaacagcaacaggcgttaaatattgccagccagttacgttgtccgcagtgccagaatcaaaacttactggaatccaacgcgccggtggctgtcagtatgcgccatcaggtttacagcatggtggcggaggggaagaacgaagtcgaaatcattggctggatgaccgaacgctacggagattttgttcgctataacccaccgttaacgggtcagacgctggtgttatgggcgctgccagtggtgttgttactgctgatggcactgatcctctggcgagtgagggcgaagcgatgaaacagcccaaaataccggtgaaaatgctgacaacactcacgatattgatggtatttctctgtgtcggcagttatctgttaagcccaaaatggcaggcggtacgtgcggagtatcagcgtcagcgcgatccgctacatcagtttgccagccagcaaaccccggaagcgcagcttcaggcattgcaggataaaatccgcgctaatccacaaaacagcgaacagtgggcgttactgggcgagtactatctgtggcaaaacgattacagcaatagcttgctggcgtaccgtcaggcgttgcaactacgtggtgagaacgctgaactgtatgcggcgctggcgacggtgctttattaccaggccagccagcatatgaccgcccagactcgcgcaatgatcgacaaggccctcgcgctggacagtaatgaaatcaccgccctgatgctgctggcttccgatgcgtttatgcaggcgaactacgcgcaagccatcgaactatggcaaaaagtgatggatctcaacagtccgcgagttaaccgaacacagctggttgagagcattaatatggcgaaattgttgcagcggagattggattaatcatctggtgatgaagattatgtcattgagctgcataaaaaataatcgaatgaacatatgccaaaaataatcactaatcagtattattgcagattaaacaaataaaaatctttccataacaaatggttattcattaatcctgccataaactcgcgttattatgcattaatgcagcgaaaagctctgttgttaaagggttgcgcaacataccgcgcaaatgatactgatcataagcgttaaaaaaatctacaaaccaacgcaacacaattcatgccccggcagtatgtcacgttctcgcgtttctgaacggggaacggcgctccattgaggaagtcattcatatgaaaaatataaaattcagcctggcctggcagattctgtttgctatggtgctgggcattctcctgggaagctacctgcactaccatagcgacagccgcgactggctggtcgtcaatttgctctctccggcgggtgatatcttcatccatctgattaaaatgattgttgtgccgattgtgatctccacgctggtggtgggtatcgcgggtgttggtgatgccaaacagctcgggcgtattggcgcgaaaaccattatctacttcgaggtgatcaccaccgtcgccatcattttggggatcactctggcgaacgtcttccagcccggtgccggggtggatatgagccagttggcgaccgtcgatatcagcaaatatcagagcactacggaagcggtacaaagcagttcccacggcattatgggcacgattttgagcctggtgccgacgaacattgtggcgagcatggcgaaaggcgaaatgctgccgatcatctttttcagcgtgctgtttggtctggggctttcttccctgcccgcgacgcatcgtgaaccgctggtgaccgtgttccgctccatctctgaaaccatgtttaaagtgactcacatggtgatgcgttatgcaccggtgggtgtgtttgcgctgattgcggtgacggtggctaactttggtttcagctctctgtggccactggcgaaactggtgctgctggtgcatttcgccattctgttcttcgcgctggtagtgctgggaattgtggcgcgcctgtgcgggttaagcgtctggatcctgattcgtattctgaaagatgagctgattctggcgtactccactgccagctctgaaagcgtgctgccgcgaattattgagaagatggaagcctacggagcaccggtgagcatcaccagtttcgtggtgccgaccggttactcttttaaccttgatggtagcacgctgtatcaaagtattgccgctatcttcatcgcgcagttgtatggcattgacctgtccatctggcaggaaatcattctggtgctgacgctgatggtgaccagcaaagggattgctggcgtgcctggcgtgagctttgtggtgttgctggcaacgctgggtagcgtaggtattccgctggaaggtctggcgtttattgctggtgttgaccgtatcctcgacatggcgcgtactgcgctgaacgtggtgggtaatgcgctggcggtgctggtgattgccaagtgggaacacaaatttgaccgtaagaaagcgctggcttatgagcgtgaagtgctgggcaaatttgataaaactgcggatcaataattgaagattgccggggatatccacccggcaatgtgtgaatgcctgatgcgacgcttgccgcgtcttatcaggcctacgccagacagcgcaatagcctgatttagcgtgattttgtaggtcggataaggcgtttatgccgcatccgacatcaacgcctgatgcgacgcttaacgcgtcttatcaggcctacgccagacagcgcaatagcctgatttagcgtgattttgtaggtcggataaggcgtttacgccgcatccgacatcaacgcctgatgcgacgcttgccgcgtcttatcaggcctacgccagacagcgcaatagcctgatttagcgtgattttgtaggtcggataaggcgtttatgccgcatccgacatcaacgcctgatgcgacgcttaacgcgtcttatcaggcctacgccagacagcgcaatagcctgatttagcgtgattttgtaggtcggataaggcgtttacgccgcatccgacatcaatgcctgatgcgacgcttgccgcgtcttatcaggcctatcttaaccgttggttaatttttcaaactcttcacacccggtatcaaacccttccatacagctcaggttcaaccagtgcagcgccttttgcttgttcttctcgataaaaccttcttcaccgtttaagaacatcattcccgcccagtactcggaataaccggttcgggaaattgcagagctgcgtttgaaataccaggttgccttgtcatcgtcggccttaatgcccacgccgttggcgtaaatcaaaccaagcagcatttgggcatcgacggcagagtcgttctccagatcttcgctggcgttttctaacaggctaattgcctttggataatccggtttacccgcttgagtatttaccagaatatgcgccagcgttacttcaccttctttactgcccgcttgcgccgctttctctgcaagaacttttgcttgtggatagtccagactgaccggattggtgattttgatctgcgccagcagcgcgcaggcatcagcatcaccgctgtcggcggctttctgtgcccaatattcggctttgctcaaatcgccggagctaaaccagctgtcggcaagaaaatattgtgcgcgtcggtccccggcctctgctgcctttaaatactggctgccaggctcggagtcgttggcgtgggcaaagaatgtcaaaaacaacatcaatgcgataatttttttcattttgataatacgattgggtagggagtaaccagtataaagagttcgaatggataaaaaaacagcctccgaaaggaggctgtagaaaggacggtattacgccagtgccgcttcgcgcaggcgagttttcaacttgttgtactcgtcaatcacgtactgctcggcggcgcgctgatcggcgatcggctcgacgcgaacggcgcagtatttgtactccggcgttttcgtaatcgggcttaagttttcggtaaccagctcgttacaggcaccaatccaccactggtaggtcatgtaaatcgcccctttgttcggacgatcgctgacctgcgcacgggtgataattttgcctttacggctgtgcacccaaaccaatgcctcatcttcaatacccagacgtttggcgtcttcggtattgatttgtgcgtagccaggttcatcagccagcgccgccagtgccgcacagttaccggtcatgctacggcaagagtagtgaccaacttcacgcaccgtactcagtaccatcgggtactcgtcggtgagtttgtcgattggcgctacccagtcgcaggtgaagaactgcgccagaccgttcggggtatcaaacttctctttaaacagataagaagtcccctgatcggcatcactagtatcgcggcaaggccactgaatgaagcccagttcgcccattttctcgtaagtcgcaccgtagaaatccgggcacagatgacgcaactcatcccagatctcctgggtgttgttgtagtgcatcggataacccatacgggtggcgatttcactgatgatttgccagtccgttttcagatcccatttcggttcaaccgccttgaagaaacgctggaagccacggtcagccgcagtaaacacgccttcatgctcgccccagctcgtactcggtaaaataacatccgccgcgctcgcggttttggtcataaagatgtcctgaacgataaccagttccagatcttcaaaggctttacgtactgcgctcagctccgcgtcagtttgtagcggatcttcgcccataatgtacgcggcacgcacttcgccatgcgctgcgcggtgcggcagctcgctgatgcgatagccggtatgcgctggcaggctttccacgccccaggctttggcgaatttctcgcggttagccggatctttcacgtactggtatcccggatacgtatccggcagcgcgcccatatcgcaggcaccctgaacgttgttctgaccacgaaccgggttaacacccgcatgcggcttaccgaggttaccggtcagcatcgcgaggctggtcagagaacgcacggtttccacgccctggtagaactgggttacacccatgccccacaggatggcggcgcttttcgcctgggcatacatccgtgccgcctgacgaatctcactggcgctgacgccggtgatatcttcaacgctctccggcgtgtagccttcaacgattttacgatactcttcaaagccttctgtacgactagcgacgaacgctttgtcgtacagattttcttcaataatgacatggcccatcgcattcaacagcgcgatgttgctgccgtttttcagtgcaatgtgcatgtcagcaatgcgcgcggtttcaattttgcgcggatcgcagacgataattttcgccccgttacgtttagcgttaattacgtgattcgccacgattgggtgggaatccgccgggttgtacccgaaaacgaacactaaatcggtattatcaatttcgttaatagcattgctcattgcgccattaccgacgctttggtgcagacctgcaacgcttgggccgtgtcagacacgagcgcagcagtcaacgttattggtaccaataacggcgcgcgcaaatttttgcattacatagttggtttcgttacccgtaccacggctggagccggtcgtctggatggcatccggaccgtacttctctttgatggcgctcaggcgctcggcaacgtaattcagtgcctcatcccaggaaacaggttcgagtttgccgccacgctggcgacggatcatgggggttttcaggcgcggggtcaggatctgggtatcgttaatgaagtcccagccataataacccttcagacacagggtaccctggttggttttcccctgcgctgcctccgcccggacgattttgccgttatcgacgaccaggttgattttgcaaccacttgcgcaataggggcaaaccgtgacgacttttttcatcggtctcgctccagttaatcaaatcacgcatacgcgctctcgactacagtatgcatcttttatgccacattttatgtggggtcattccctgatattacgggcactatttattcaaaactctgacgaaaaacaggctgtcgtcagttttgacgtgacgaaacgaaataccgcgtgacagccatcacgcggcagacattttattttttctcgacgacgggacctgcctgatacccgccgcccaggcttttcatcaactgaatgctttggatcacccggcggctgtccagcatcagtaaactcatctcttcggcaagcactggcaaccgggcttcggtggcctgtaagcggctggttaagccgcgctgataggcggcctcggcagcgcgctgggtaaagcgcgtggcttccacgcgttcagcctgcatttctcgctcgtcgttgagcgtttgcagacgcgtgccgttgacggcaacgtcacgcaccgcgttcagtacactctggttgtaacgttcaatcatcatgttgctggcggcgcgcgtgccttcgagattggcattcaaccgtccaccgtcaaacagcggcaatttcagacccgggatgaagttgaactggcgactggtttttttgaataaggtatgcagatggatggagtccagaccgaaaaacgctttgatatcaaagctcggatagaacaacgcccgcgcggaatccacctgatctaaactcgcctgaacataccagcgcatggcttgcagatccgggcgtctggcgagcaactcataagagagtgtcgccggaatgccggtctggacttgcggtaatgccaccggtctgatctccggcatatcgctggctcccgcgccaatcaatgcacgcagagattctcgcgtttcggtgatttgccctttgacggcaacaatttgtttatcgaccgccagaatctgtgcccgcgcgccgtggaaaggcacttgcgcttccagaccgtgcgccactttactctggtgcgctttcaccgcgtaatcaatcacatcgtgagtttgttctaacagatcgagcatctgatagctggcctgcatactgtaataaagctgcgctacgcccgtggccaggcttagctctactgctgcggtttctgccagcgcggcattatgcgcgccaatggcggcggcaaccgcactgcgatgcacaccccacaaatcaagatccagtccggcaaacaaacctactgtggcttccgtatagtacggcccgtccatacccagtgctggcgcatccatactataagggcttaaaaagccgttcgcgctgacacgttggcggttgagcatccctaacgctgcgacctgtaattgactaccggcatctaacaaatcggcctgggactgcgctttttcttcccgcagtttcgcttcggcgagggtgtgactaccacttagcgtccgttggatcagcgcatccagctgcgggtcattgagttgtttccaccactgcgcctgcggccagccggagctggcaagatgaatatcgtcggccagtttgatttgttccggtttgagctgttgatgaggtgcagaatccttacgtaccagggcacagccggaaatcagcgtcgtgctgccgagaatgctgcacaacagcagacgactaagttgacgattgatcattgcgtggctccttgtgcctgttccgtggcgggcgttaatgccggggctgtccagtctggcaagcgggcgaaaagctggcagacgtgttgctcctgttttaataaggtgggcaggatggcctgagaggcgggtgtctcttcaagcgttatttgaggagaacggctgagtgcggttgccagaccggcagcgtatttctccagggcgtcggcaaactgacctgctctgtccggctgtagtgcgttatccagcgcctgcgcgctgttccaggtggcatcccaggcgtgaagaagatcgcggccctgacgaataaccgtttggctacgttcaatcagtaatgcgcgttcttcgctgtccagttgacgctccagcgccacgcgttggcacatctcttcacaggcattaaacgccgcatgcagaccgatacgaatttgcagataagtgcgcagagccgtgacttcctgctggcgtgggatccgcattactttacttaacatacccagcgtgccagccagtttttgcggcagtgtgcgcgcttcactttcaggccagacaaaggtgtaaatcaccgcggacaccacggtaccaatgatgatacccagggcgcgatcgcgaatttccaccaggtcgtacactgggccaaaaacgttttcgagcgtggcgagcgcgaaggtgaccaccatctgtgtgccgatataagaagagcgttcagagctggtggcaatccatgcgcccaacaggaaaatcggtgccagcacaaacagcaattcgacaatattgtccagccagggcatgaccagtagcgtgaataacagcgccagaatcgcgccgcaaaaggccccgccaaaacgcagcaccatcttctggtagctgctaccgacatttgggttagcgacgatcacgcatgtcagcatacaggtgtgaatgccttcccagtccacgccgctgtaaaaggtgtaacagatcaaacaggcgagcagcgtttttaccgcgtagcgcatatagtctggattggtaaaagcatcggcggccatacttggcggtttggctgcgggcgttggcggcgtattcgggtccatctgacccagttgtaacaacgtctggcagatattctccaggttacattcccgtgccgccatcgcttcactttcactgatccgccagtcgctttgccagcactgaccttcagcaacggcatgctgcagcttgttgatttcactagctaatttttgtcggaattcaataattgcctgagaatcagcaaaagaggtgggatcgtagcgattcagcgtgctgtaaatgtaggttaccgttgccacgcagctttgccaccatgcgttttgagttcgccagttggcatcgtccgcgaggcaaaagacattgagtttttgtagcgccagcgcctctctttcaatccgcgtttcgggtagcggtgcgaggctgtctgtcaggtgactaatggcatcatcaagccgatcattaagcgcctgatgcatttggctaatggcacgactgggaaaccacagcacgccgattaacgtcatcagcaaggttggatagaggccaacaacgatacaccacagcgttaagcgcacgaccacttccggatagtcgagcatggcggggaaggtttgcccgtaaatagcgacaatggcgacggcgaaaaagaccagccccaagcgatgggtgcgcatcaaaaacatgcagcccatcaggatcggtccggcgatgatcaatcggatcaacggttcgccgtaactccatttgtagatcaaaaacaggctgccgatctccagcaccgtggcaaccacaaacaagatcgcgacaaatttggtgtaaaacgcgttgctctgaataccgtaaaacagcactgccaggcttaacgccacaaaagggatctcaaaggtcatgctgatcagaatcaccagcaggcagcctacccagagttgcacggtctgcggcacgcgacctggtcgccgctcgcttaactcttcatgaaagaacgccagcagcctgaccaccggtaatggcagggagttgagcgcgctcattattgcggctcaagattagcgactgcgctagcgccgatgcggaacatttccgggtcaggtttatcgaccatgattttgaccggaaaacgctgggcaacgcggacccagttaatagaacgagacactttcggcaggccgcccagcaccaggccgccgtcatccggtagcacgccgtagccaatgctatccactttaccctcgaaggttttgccgctgtcactcatcaggcgaatcgttgcgggtgtaccactgcgaatatttttcagatcggtttcgcggaagttggcgatcacataccagtgacgagtgtcgattagggtaaaaatagggcgcatggcagaagcaaattgcccgacggaggttttgagggaaatgacccggccatcaaacggcgcgcgaacggtcgccatttccagatgcagtttggtcagggcaatatccgcttcgaccgccgcacgctgggcaactaatgcatccacgccgctgacggcgctggcggcactctgcgcctgtaacaatacggcattaagatccgcttctgcggcgcgctgcgccgttcttgcacggtcaacatcttccgcactgacaaaaccttctttcagtaatggctcggtgcggcgtaatgtatctgtggcctgtttcgcggcggcacgggctttttctaccgtggcattaacgctgtcggcaccaaactgttgcgcgtcaacgctacgctgggtgagcataatttgcttatccagcgccgcgagggaggcttcagctttcgccagattggcttcgtacgggcgcgggtcgatgcggaacagcaaatcgccctgtttgactgcctggttgtcggtgaccgccagttctacaatgcggccgctgacttccggtaccacatcaatggtatctgcactcgcgtaagcgtcattagtacttggcgcactgtctacgcgccagataacgaaaacaagggcaaccagcgccaacgcaaccactaacagagcagggaatttactgcgaggagcttttttcggcgtactttccatgagcgcgtctcaaatagattagaaaaatgccagccagaacagcatggcgtagagagcaaaaagggcggtataaataattccgacaaatgccagattgatatttgcccgctgaataactcgcctcgtgatgagcgtcaaaataaggctggcaatggcgcagaaaaaccagctgggataataagcgccgatcaccgggattgccggagataatgagcatcccgaaaccatgaagacgggaattatccaggctgtttttttgagttgcatcgccatgcgagagagaactgttggcatattaaatacatcctgtctgctgcgaacaatatctgtagtgaatatcaatatccattgaaggcgtcagtatggctattttcttgatgaataaaaatagctttattcagccaccgcattcataacttatatattttatttattaattggctgtatatatttttaaaataaatacttttgggggcttcagcgcccccaaaagcgagtgacattaatttggggttacgatattcacccacaaatcgaaattatccagacaggcgataatttcttccagtttcgcgccattgccaataattttggctttcttcgcttttaccagatccgccattttggcttgtccggtcagcacggcgtgcagatcttcacggctgatgtagaaagaggcgtcggcttgcggttgcagcgttttccggtagttaagcacgctatcgttcagcgtcaggttgaggttatcgccgttgctcatattgaagttcaggctgatatttttacccgcagctttcgcgctatcgaggcgaacggccataaagtcgaacagcatttcgacgctcatcccgcgaatggtgtccggggaaccggtggtgccgtggctgaacttatgcaccccttcgcgcagctctttcgcgccggtcaggtagaaaccgcgccatgtggcggactcggcctgatagcccagctgttcaaagttattcgcttgcagattcttcgcgacctggtcacccgggttggcggcaatcacctgtttcagcagttctgcgctccagcggtaatcaccttgcttgttcgcttcttgcgccaggttgatgacacgggcagaaccgcccagcgcctgcacgtaacgtttacccatctccacctgaccatacggatgcaggttagccgggttaccgtcgtaatagccaagatagaagttatacaccgcgcgggcgttgtggctgacagaaccgtaatagccgcggctggcccagttattggcaagtgcaggcggcagcttaatcatgtcgccgatttcattcatggtgtagccctggttcgccaggtgcagggtctggtcgtgaatgtacttgatggtatcgcggtatttaccaatataatcattgatatgcttattgccccagaccggccaggtgtgcggcataaacagcacttccgcgtcgttaccccacatatccagcgtttcgttcagatactcggtccacttgctggtgtcgcgggttttcgcgccgcgcagagtgtagaagttgtgcagggtatgcgtggcgttctcggcggtacacagggctttcagggccggaatatagaagtgcatttcggctggcgcttcgctacctggggtcatcaggaagtcaaactccaggccgtcgataatcatcttctcgccagttctgacgatagttttcgtcggtgcaataatgctcgggtcgcccgttgccagcgtcacgccaaggccattacccacattgccttgcgcgttgtgcggcagtaacagaccgtaagagtagagcgcacggcggctcatgatgttacccgccagcacgttttcgctgatggcttcgtccataaagcctgcaggggcaatcacctgaactttgccggatttaacatcggcttcagagataatgcctttcacgccaccatagtggtcggtgtggctgtgagtgtagataacggcaacaatcggtttttgcggacgatgctggaagtaaaggtcaagtgcggcttttgcggcaggcggcgtcaccagcgggtcgataacaataatgcctttctcgccctcaacgaacgtaatgttagagatatcctggccgcgcacctgatacattttatcggtgactttgaacaggccagaaataccgttgatttggctctgacgccacaggctggggtttacggtttccggcgctgcggcattaatatcaaatttgtaatcgtccgcgcggtagtaaactttaccgttcgcatcacgcagaataccttcatccagcagcggggcgataaatccacgctgggcatcgtcaaaatcctgacgatcgctaaacggtaaacttttggcgtaattctgattaacctgttgggtatattgagtggcggctttcgcttcctctttcgcgttagcggtatttaccatcatgccgctggcggcagttaacgcaataacaatcctgctcaaacggaataaccgagagttattcatataaatctccatttatcatttatgtcgtaaatatgtaatccatgcaaaatacgtcatttaaagctggcgttatcataattgggaaattgcgactttaataagtggaagtgtgagcggaacgcgccattttattaggcatttgtgctgaagagggaaaattacagtaaaactatcattgcagaaaataatatgagtcgttttatgtgtttattatatatattgtacctgtcgttggcacagcgggacattgcgctactgtgccaacgttttactcatggggctttagcacagaactgtggcaaaaaacgttgatgcgccaatattgctgcaccctgagcgccattaaagtcagaagaactggcggcaataaagcgcacgacctgatgcggcagtggacggcgcaggtacttttgggtcatggcaacgagagtctcgcgtgggaaggcgggcatatccatcacgccaccgcccaggatcaccgcatcgggatcgaacagattaatgctggtggcaatggcccgtgccgcgttttcaagcagactctggacgaaaggggcgttttccgcatggacgaaaagatcgcgcaatgggtaatttcggggctgttgttcgtaccagcgtcttagcgccattccagagcaattggtttccaggcacccaggattgccacacgcgcagtgttgggtcatatctcccagggggatatgacccagttcgcctgccacaccgtgtgcacccgtccacggcgcaccgttcatccacactgcgaaccccatccccgtaccgagataggccgccagaaccagttgttgcgtaaggcggttttctactacgtcccaggagagttgcaggttaacgtcgcgggaaaactcaaccggacaattcagcgtattttcgagcttatcggcgagatcatataaatccgccgctgttaacggcaggttaggcgtagaaataatggtgcgtttatctttactgaccagcgccggaaatcccatcaccagaccatgacagcgagcgttaaagcgcctgagttgctcgtcaatcatttcgccgataccgctcaccaggccgggagcaatgacttctgcggtccgctttttttcgcagtgtagcgtttcaccttctgctgtccgcagacaaaagcggatatgcgttgcccccatatccacgcccgctacgacgttatgctgtttttgcatgaggctgtacctcgctttttgcagccagaatctgcgcggtcataattctccatgcttcgtcgatattttccgcatgattaaacaggccggaagtgccgacgataaagacatccgcccctgccgccatcagtttttcgtaagttgcctggttgcaggaaccgtccacctcaatttcgtactccagaccttctcgttcacgccatgccttcagttcggcaagtttatccagcatttcaggaatgaacggttgtccggcaaagccgggatcgacagtcatgaccgtaattttatcggccttatggatatagtatttcatggcctcaactggcgtctccgggttaaggatcagccccactttcatgtcatgacggcggatttcatcaatcaggcggaacgcctggccgttgatggtttccggatgcagagtgatgaaatctgctcccgcacgcgccagttgagcaatgtaatcctgcggccgcgtcaccatcagatgacagtcgagcggtttagttgccagttttttaacctgacttacgaagaacggactgagtgtcagattggggacaaagtgaccgtccatgatatcgatgtggaagtaatcggcatggctgtcgataaattcgatctgttctttaaatttcagcagatccatacacattaagctgggggagattttcatgttcaattccttacttactgataagacggtcaagggcgacagccgcgataattaatccgcccatcaccaccagttggtaataggtttgtacctgcaaaatattcagaccgttgttgatggtgccgatgatcaacccgccaatcaccacagagaaaatgcgccccttgccgccgaagaaactggtgccgccaatgatggcgctggcaatggcataggtttcaaaacccataccggcaagcggttctgcggcaccgagtcgtgcagtactgacgacgcctgccagacctgcacaaacaccggagatgataaacaccaccaggatgtggaatttcacgtcaatcccggaatagaacgcgctatttttgttgccgcccagtgcgtagatgttgcgcccgagccgcatacgcgttgtcagaaaccaaaggatgagcgcgacaattagactgaagataacggggacaggtatcccaattacgctggcggcaaagaagttcacgaagtcaaaactgaagccgtatacgctgttggcatcggagatcaccagcgtgatcccacggaaaatcgcgttggtgccaagggtgatgatgaacgggtgtagccccgtccagttgaccaggcagccgttgatcgcccccagtgcgccgccaaccagtacaccgccaatcatcgctgcgagaaacgggtcaacacctgccaacatcagtttggcggtcaccataccggaaagcgccagaatcgcgccaacgctgaggtcgataccagcgaccaggatagcgaaaaactcgcccatgccgatcaataccgtcacggagctttgaacaaaaatctgggtaatattattggtggtcagaaaatattctggactcaggctaccaaagatggcgacgatgatcgccaggataaaaaaggtgccgtatttatcccagaacagcgcaaagttgaacggtttcttctcgctcgcttcgctttttactcttgtggtaaagcccatgccataatctcctcttcgctcatgtcatcgcgattcgtcaggatttgcgtcagtcgtccttcgcagaacacggcgatgcggtcgcagacggtgataatttcaggtagttcagaactcaccatcaggatgacttttccgtcgtccgccagttggcgcatcactttgtaaatttcggctttcgcgccaacgtcgatgccgcgggtaggttcatcgaaaataatcacttccgggcaacagcacagccatttggagatcaggactttctgctgatttcccccggagagttcggtgatattctggtttacgctatgacatttcagcgccagcagttcgcgttgattttcagcggtacgttgctcgtcaacttcatgaaacaagcccatcgcgcctttatagccgccgtctttcagactgcggctgatcgccatgttctgagcgatggaaaagttggggaaaaaaccgttatcccggcggctttcagtgatgtaagccatcccttttttcacggcatccaggggactacgtggagagatatctttgccattaagacggatttctccgccagcgcgtttatccacgccaaacagacaattcatcagttcagtacgtccggaaccgaccagtccggcaaagcctaatatttctccccggcagacgctaaaactgatatcccggaccttttttctgtcacgactggtgacgttccgcacctcaaaaaccgtttcgtgcgcaaggttgctgacattctccttcatcgcgttaaaacggttttgcagttcgcggcctaccatcagacggacgatatcgtcattactcacatcgcttactatgccgctgcaaacgctgctgccgtctttcatcaccgtatagcggtcgcaaatacggcgaatttccgccaacttatggctgatatagacgatggccgtaccctctttacgcaactgattcatgatcagaaacagatagtccacctctttattggtgagactggaggtgggttcatccatgatgatgactttggcatcgagcatcagcgttttggcaatttctagcatctgcttgtggctgatagataaattcgccactttctcatctagatcaactttcaagcccacgcgtaataacatcatggcggcgcggacacgcatttctcgccagtcgataatattgacgccacagatttttttcgtcagatgacgaccaatatataaattttccagtacggttaattcatcaataacgctgagttcctgataaataatcccgataccgagttgtgccgctaatttatgatccagcttgttatagctaatgttattaatggtaatggtgcctttggtcggctcatgtattccggataaaactttcattagcgtggatttacccgcgccattttctcctagtaatgcatgtatttcaccaggataaaccgttaaattaacgctctttaatgcgtgaaccggaccaaaggacttgccgatccccgccatgcttatatatggcgtggccataaataacctctctgcacgaaatatcgtattattgcctgatggctacatttatcaggtctacgttcaggttattttgttggccggataagacacttcattagcatcatcatccggcatcattcagttttattgagtgaccaggatactatcgaccagtttaaattccggtgctttatccagcgggataaccttgccggatttctcagcgtcaaccatcagcttcagacccgttgcgccgatatccgccgggttctgggcaaccgtcgcggtcatttgtccggcttccaccattttgcgggcttccggaatgccatctgtaccgacgaccagcacttttcccgtttttccggcgtttgcgactgcctgagcaacacccattgccatcgtgtcattcgcgcaatagatcgctttaatattcggattacgttgcaacacgttagtggcgacatccagtgctttaatgcggtcccagtcggcaggctggctggcgacaagcttgatctggcttgcttttttgaaggcttcggtggcaccattacgacgcgcttcaccggaggcgttaccggctttaccctcaatgattgcgacttcaccaccttcagcgcccaatttgtcaataatgaagctcgcgcctttcgccccgacagcaacgttatcggtggtgacaaaagcttccacattgccgccagcttttttcagattatccatgtcgattttttcatcgagattaaccagataaatgccttttttccatgcgcgggcgacaggcatgaccagattcacactggataatggagcgaaggcgatacctttgtaatttttattactgagatcttcaaataactgcaattgagattgaaaatcgccttcactaggagaggcaaaaatatcaacgctgacgcccagtgtttttgcttcatcttcaatgccttttttcatatctacccaaaatgggttggagagggttttcaatacgacagcatattcggcggcagcaaaagcgctggtactcaacattaagcccacgagtgtgccgctgaaatatttcagatatttattcataataatgttctcacggtaaggggacaggtaactccgcgatggcggaattacctttttcttatttcagcgcgcctggactgaagaaatcaacaattgcgccggttttttgcatattaatattagcttgttcaatgttgagctgggcgacagagacaaaaaaagcgtccagcaaagttagttgtaatattcttgcgctggcattacgacctaataacggcgtttccggggctggactgcaaataatataatcggccagtttcgctatcggactatggtagctatgggttatacaaataatctttgccccgttcttttttgccagttctacggccgcttttacatcactggttcgcccggaatgggtcactaccagcacaacatctccttcctgtaacaagctagcggacatcatcatgatgtgagcatcaggataggcctgacagcgtacgccaatgcgcaagaacttgtgctgtacatcagcacagatagcattacttcctccggcaccgtacaaatcccgctgtctggcctgatagaaaaagcgggcggcacggtggatctcatcaacgttgacgatgctctgaccttccataatggtgcgtaaagtgatgttaaataccttattcaccacatcctgcggcgcttcatcaaaagccaactcggaaggcaatacctgttcactctgagaaaaataatcttccagcgcactgcgtaagttacgaaagccgctaaaccccagcagcttacttaccttaactatcatcgcttcagataccgccagagcttctgcgacatctttaattgcgggtgcacaactcaggttaccgggtttgagtaaccactccacgatgcggctttcattttctgtcattccttcctgcttcattcgcaggtaaggcgctaaccctataccgttcggaagcgcactatcaaactcactctggctcatcacgttctcttgtccttgaattgaagacgccactatatcaccacagcaagaacagaaaagatgctggcgacttcacaaaaaaataaaatttataaagtttattttattgtgaacaatggcgagtggcttaaaattttatttcatttaattagtttaaaaacatgatgttatttgtttttctggttttttagatgatagatgttgctggatggtgagtgtctttaacgctattgcgctgtcagatgtaactctgtaaaacagatcaggaaggcgtaattcatcgattttgggtgtttttaattcattaacatcacaaatgttttttgattgtgaagttttgcacggacggggaagatgaatgaaaaagattgcatttggctgtgatcatgtcggtttcattttaaaacatgaaatagtggcacatttagttgagcgtggcgttgaagtgattgataaaggaacctggagcagtgagcgtactgattatccacattacgccagtcaagtcgcactggctgttgctggcggagaggttgatggcgggattttgatttgtggtactggcgtcggtattagcatagcggcgaacaagtttgccggaattcgcgcggtcgtctgtagcgaaccttattccgcgcaacttagccggcagcataacgacaccaacgtgctggcttttggtagtcgagtggttggcctcgaactggcaaaaatgattgtggatgcgtggctgggcgcacagtacgaaggcggtcgtcatcaacaacgcgtggaggcgattacggcaatagagcagcggagaaattgagattcatccactacttgcatggatgagtaatgattaatgtggatagagtttctttttgaggttggctaatgaaacgctttccgctatttcttttattcaccctgctcacgctgtccaccgttccggcccaggccgatattatcgacgacaccattggcaatattcagcaggcgattaatgacgcttataaccctgaccgtgggcgagactatgaagatagccgcgacgacggctggcagcgtgaagtgagcgacgatcggcgcagacaatatgacgaccgccgccgccagtttgaagatcgccgcaggcagctggacgatcgccagcgccagcttgatcaggagcgtcggcaactggaggatgaagagcggagaatggaagatgagtatgggcgatgaggttgggtatggagcaggcatcgcccctcaccccaatggggagagggagaaaacgagcgcaatattcaatatcgagcacaatcggtcccctcgcccctctggggagagggttagggtgagggggccagcgcgcacattccctctcatcacgccaccccaatctccatcccatcaaaccccacctcaaacccactcggtagtgcgttttccatcagccacgcatcaaactggtggctgatatgggtcagaatcacccgtgggctgcggataacctgattcagcgcaagcacggtatttaaatcacagtgattacgcggtgcatccgcgcgcggcgggtgactgcaatccatcaccattacctgcggctgattattgcgtaaaaatttcagcgttttttccggcaagcctgcggtgtcagacagccacgccacccggctgtgtgccgtttccagcagataaccgaaggtcagtttactgtggttgagcggcaggggcgtgacctgtaacccctgcaaatcaaacaccacaaacggttccaccgtgtggctgaaatcaagcaggcccggatgtttaaacagatcgtcgcagccctgttcatccggcgggccgtaaaccgggatcggatcgccaacgccccagcgcagcggaaacagcccctggacgtgatccatatgataatgcgtcagcaaaaactgctggaagcttccggggctccagcgatcggcgagatcgtgcagcccggcgtcgatcagggtgattgcgtcgttaaacttcactacgccgctgcacggttggcggcgatactgcgggctgcgccgcgctctggcgcaggccgcacactcgcagccccatgccggaacgccctgtgcgccgccggtgccggtgagcgtgagggtcaggctcatgttacagcgccttggtgaagcggaagtggctctgctcgtagccttcgcgcagatagaaacggtgcgcgtcgtggcgcttcacgttggtgctaagttcggtcatttcggccccggcctggcgggcttcttcttctgcccacgccagtaacttactgccgacgttcagaccgcgcgcctgcggcattaccaccaactcctgaatttcgccgatccagttgacatgatgcagatgaaactgcaaatgcaggccgatcatgccgacaacttcgccatcaagcagcgccagatggtagcgcatgtttgggtcgcgcagattggcgttaaaacccacgcgaaacgcgtggtggtcaaactccgcctgttttagctcacaaatcagcgcgtaaaccgcgtcggtgtcgtactgcgtggccgggcgaagctcacaagcaggcatggtgtttctccttctgatggatcagcgtcagcagcgtgtcgacgctctggcgcaggctgccgtcattgttgagcgtatggcaatcctgtggagtatagcgggcggcgcgcgccaggcgggcgttaatttcactggcgttttcacggccacggttttccaggcgctggcggaggatctccgggctaacctgtaaacagacgggcagcagcgcgctttgatagcgcgcccgcgcctgcggcagatgggcgcgactgccgttgaccagcacgtcgaatccggcgtgcagccagagatcaatctcgacgccgacgccataatacagaccgttagcgtgccagcttaaggccaacagattttgccccgcgcgggtaaaaaactcctgctcgctcagggcgatatggttttcacttccggcgctggcatcgcgcgtgatgtagcgatgcgccaccagtaactgagtttgttcccgcaggcggagttccgccagcaggctgtctttcccggagccggacggccccattaaccaaatcagttttcccatcatcagaacacccttttaccctgacgccagacgtggtcgatatgaatatgattgtccttgcgatgcgccagcaccaggtcggcgcgtttgccctcgccaatcaccccgcgatcctggagattaagcgcctgcgctggatttttagtcaccagcttcaccgcctgcggcagcgtaaagcggttgctctggtcatcggcgacgcgaaatgccgcatcgagcaggctggcggggtagtagtcggaagagaggatatccagcaggccaagctgcgccagttcactggccgccacgttgccggagtggctgccgccgcgcacaatattcggcgcgcccatcagcacgttcatgccatgcttgcggctggcttccgccgcttcgaacgtggtgggaaattcggcgatcacgctgccaagctggtgagattcagcaacgtgggcgtgggtggcgtcatcgtggctggcaagcgcaatttttcgcgcgcggcacagggcggcgatggattcgcgattcggctggctccagcgtgcggcgagcgccagttgctcttcttcgtactgctgcatctgcgcatcagtgagggagtatttgccctgataatattcgcgatacttctcgcggttggcgaactggcgctggcccgggctgtggtccatcaggctcaccagcgtcaccggctcgcgctgcaccagtttttcaaacagcggcagcgtggtgtgatgcggcagttcgcagcgcagatgcagacggtgctcggcgcggttgacgccgcgtttctgcgtctcttcgatggcgttgatcatcttctccagattctccagccgatcgccgccgtcgcgcacgtcgccaattgccacggcatccagtacggtggtgatgccgctcgccaccatcagcgcgtcgtggctgctcatcgcgctgtgggcaggccagtcaactttcgggcgcggggtgaagaatttatccagattatcggtatgcagctcaatcagccccggcagcagccagccgccttcgccgtccatcgcctccggcaggcggctctggctttcggcaaaggcgcggatttcgccgttctgcacctccaggctaccgcttaccacctcgttttccagcaccagcttaacgttattgataatcatgaagaggctcccattgggtgttagctcaactagaggctcccattgggtgcaggcggtcggcgacgtcattacgtacagcttcgtcatggaagatgcctacgatggctgcgccacgggttttggcttcgcgaatcagttccaccaccgcggcgctgtttttggcgtccaggctggcggtaggttcgtcaagcagcagaatggggtagtcgacgataaagccgcgggcgatgttgacgcgctgctgttcgccaccggaaaatgtgcttggtgccaggtgccacaggcgttccggcacgttcaggcgggtgagaagacgcgcggctttagcggcgcaggcttcacgcggaacgccggtatcgagcagcggctgcatcaccacttccagtgcactgatacgcgggatgacgcgcagaaactggctcacccagccgacggtggttttgcggatttccaccactttgcgcgctggcgcggtgaccaggtctacccactcgtcaccgtgtttgatctggatttgaccttcgtcgggcagatagttggcgtacaggctgcgtagcagagtacttttgccgctgccggaatggccgtggagcaccacgcattcgcccgcgttgacggtgaggctggcgcgattgaggacgggcaggcgcacgccgttttgctggtgcaggatgaaggttttactgacgttttgtacgttaatcatttttcgcctcgtggttcgggtgtcggatgcgacgctgacgcgtcttatccgacctacggggagcgcatttgtaggccggataaggcgtttacgccgcatccggcaccggctcaattctgcaaaacgctactcaccagcagctgtgtatacggatgatgcgggtcgtcgagcacgcggtcggttaacccactctccaccacttgcccctgcttcatcaccagcaaacggtccgccagcaggcgggcgacgcctaaatcatgggtgacaatcaccaccgcgaggttcagctccaccaccaggccgcgcagcaggtcgagcaggcgggcctgcacgctcacatccagcccgccggtcggttcatccataaacaccagcttcggatgcgtcaccaggttgcgggcaatctgcaaacgctgctgcataccgccggaaaaggtggtcggcaggtcgtcgatccggttggcgggaatctccacctcttccagccacttctgcgcggtggcacgaatatcgccgtaatgacgtgccccggtcgccatcagccgctcgccgatattgccgcctgcgctcacctggcggcgcaggccgtcgagtggatgctgatgcaccacgccccattcggtacgcagcaggcgacggcggtcggcctcgctcattgcatacaggctacggttctcgtagtgaatttccccctgctgcggcgtcaggcgcgcggagatgctcttcagcagcgtggtcttcccggagccggattccccgacaatgcccagcacttcccccggccataaatcaaaagagacatcgctaaagcctttgcccggcgcgtaaaggtgggtcaggttattgacgctaagtaacggttgattcattggttttttgcctcgctctgttggcggcaataatcggtatcggagcagacaaacatgcggtttccggcgtcatccagcaccacttcatcaagatagctgtgggtgcttccgcagatggcgcatggctcatcccactgctgaacggtgaacgggtgatcgtcgaaatcgagactttccacgcgggtaaacggcggcaccgcatagatgcgcttctcgcgccccgcgccgaacagttgcagggcgggcatcatgtccatttttgggttatcgaatttcgggatcgggctcgggtccatcacgtagcgcccatttaccttcaccggataggcgtaggtggtggcgatatgaccgaagcgggcgatatcttcatacagtttcacctgcatcacgccgtactcttccagcgcgtgcatggtgcgggtttccgtttcgcgcggctcgataaagcgcagcggctcggggattggcacctggaagataattatctgatcttcggtcagcggcgtttcggggatgcggtgacgcgtctggataaccgtcgcatcgtccgtacgttccgtggtgtttaccccggtcacgcgcttgaagaagttgcgaatgctcacggcgttggtggtgtcatccgcgccctggtcaatcaccttcagcacgtcgctttcgccaatcacgctggcggtaagctgaatgccgccggttccccagccgtacggcatcggcatctcgcgcccgccaaacggcacctgataaccggggatcgccaccgcttttaagatggcgcggcggatcatgcgtttggtctgctcgtcgaggtaggcaaagttgtagccgctcagattagccatggttctgctcctgttgcagacgtttgagtagctccagttcggcctggaaatcgacgtagtgggggagtttgaggtgactgacaaagcctgcggcttcgacgttgtcggcatgtgccagcacgaactcttcatcctgcgccgggcctgtcgcgtgctcgccgtactccggggcttgcagagcgcggtcgaccagcgccatcgccatcgctttgcgctcgctcatgccgaacaccagcccgtagccgcgcgtgaagtgcggcggctcacccggcgggtcgataaaaccgttaaccatttcacactcagtcatcagcagttcgccgacgttcaccgcaaatcccagctcttccggcacaatgctcacgtcgatatagccgctgcggatctcgcctgcgaacgggtgattgcgcccgtaaccgcgttgggtggagtaggccagcgccagcaaatagccttcgtcgccgcgcatcaactgctgcaaacgggaggagcgactgcaggggtaaaccggcggcgtgcgggtgatgtcatccggctgtgcgccgctatcctcttcaaacttcgccagcccctgacgcgccagcaggctgaaaacgtgcgggctcggctgctgttcgctgtcggcggtggtcagcgtcggcgcttcgccgtttgccagcagggtaaaatcgagcaggcgatgggtgtagtcgtaggttgggccaagcagctggccgccgggaatgtctttataaacggcggagatacggcgttcgagacgcatcccggtggtgtcgagcggctcgcttaccgccagcttcgccaacgtggtgcggtaggcgcgcagcaggaaaatcgcttcaacgttatcgccgctggcctgtttcagcgccagcgccgccagttcgcggtcggcaatgccgccttcggtcatcacgcgatctaccgcgaggttaagctgctgttcaatctgggcgacgctcagttcgggcaaatcggtatcgcctcggcgtcggctctcttgcagggcgtgggcggcgtcgatcgccttctcgccccctttcacggcaacgtacatcagcacacctccacatgagtggttcgcggaatagccagcaggcgctcgccacaggtcaggatcaggtcgatgccgagcgggaacggatgcgggcgctcggtgagttcgtgcagaatgcactccggcagctgcggagcgatcattcgttcttcggcaatacccgcaccagtaaggcgcaacatgcgtccgccgctcaggctggcgacctgtaaaatcagcgtcgcacccgcttccggcgcaacggcggtgccggtggaaagggcgttgagctgttcgctggaaatcgcctcatccgtcaccgcgaaggtcgcctgttccggctggctgaccagcggcgcgttggtatgaaaacgcaggctctggttgacgatatcgttatttaatggggtagaaagccacaccggcgtgtcgttatcggccagcgtcagcagcacgctggtggtggcgatattcagcggttgccagccgcgtttgagctgatgcagggcgacaatcacgcccggctcgctcatggcctttaacaggcgacgaaaactgtgctgggcatcctgcacgggaagcataaaagcggtttccagggtcatgcgttgtctccgcgaaccatcgtaaagaagtcgacccggctggcgttcacttcggcctggcgtgcggcaatgcgtgccatacggtcagcgtccagcggggcaataagggtttcacttaagttttgaaagtggcgagattgctgcatcagcgcgtcaatcagcgcgcagcgttcggcgtgctgtttatcacgcccctgcacccagctgtagccgagcgtgccgtcagtcaggcgcacggcggcgcgggtcagcgtggcgtcgccggcaaaaaaacgttcgccggtgccgcccatccgcgcctgaatctgtaccaggccagtttcagcggcgcggatcacctcatagtcggcggtgatgtttagcgcgttcaggcgtgctgccagttcagccggttggctgtgcgccagcacggacatccagtgctggcgggtcgcggtatctgcgtgcattcagtgctccatagtgaattcaatcatgtcggcgcgcgtcaggctgacggagtactccgccgggctgctttcaccgtcacggtggttaagggtgcgcacgcacagcagcgggctcatattcgggatttcaagacgctggcactctttggcctgggcgcggcgggcgctgatccgcgtctggctgcggcgcagcgcaattccggtttgctcgcgcagaaaatcgtgcaggctgccgctgtcgaagcgttgcagcgtcggccagagggtgaggtccgcgaagtagtggtcgattaaacagagcgcgacgccgttgacacgacgcagggtgcgcaggtggatgacgttctccccctcggtaatccccagtgcgtcagcgacgtggccggacgcggggcgcaatacgctaagcagtttttcgctggtgggatggctgccctgatccagcagattctggctaaaacgcgcctgggcgttgagcgggtaatcgaacgggcgcatcagcaccagcacgccgacgccctgacggcgctgtacccagcctttttccaccagttggtcgatggcgcggcgcagggtgtggcgattcacctcaaagcgcgctgccagttgctgctcggcgggaagatagtcgccgcagcggtagtgttgacgaagctcctgctcaagttttgcggctatctcttgatagcgtgttgggtagctggtcggatgtgtagacaagtgcatagatatcaatgcctcgcttatcagataaagtgcttacgcaaccgttgagagaggaaatccagcaggctgaccgtgacgatgataagcaccatcagggcgcaggtttgttggaactggaaaccgcgaatcgcttcccacagggtgacgccgatcccgcctgcgccgaccatgccgacgacggtcgccgagcggacgttggattcgaagcgatagagggagtaggagatcagcagtggcatcacctgtggcagcacgccgtagaggatctcttcgagcttgttggcaccggtggcgcgaatgccttccaccgggccgggctcaatcgcttccaccgcttcggaaagcagcttggagagcacgccggtggtgtggataaacagcgccagcacgccagcacgccagcgaacgggccgaggccgacggcgaccacgaacagcatggcgaagaccatttcgttaatggcgcggcaggcgtccatcaggcggcgaacgggctggtaaacccaccacggcaccaggttttcggcgctcatcaggccaaaggggatggagagaaccaccgccagcgcggtgccccagacggcgatttgcagcgtgacggccatttcggtgaggtaatcctgccactggctgaaatcgggcgggaagaagtcggcggcgaacgtcgccatgttgccgccgtctttgatcagcgtaagcggggccatttccgcgccctgccacgagacgaccaacacggcgagtacaacggcccagctcagaagcgagaaccagctgcgcttgggtggggcgatggtgatggtttgcatgtttggctccggtctgtaggccggataaggtgcttgcaccgcatccggcatcaacgcctgcacattgtcggatgcgacgccggggcgtcttatccgacctacgatttactgcaccgctttactcacgctactcatcgcgcttagcgcgttgttcaggcggtccaggtcatccagctgcgcctgaatctcggtggtttttgccagcttgtcctgctcattcagtcctttattgcttttcacgccctgcatctctttaaacagcgcgagctggcgaatcggcaccagttgcaggtcgctggaagcgcggaatggcgcccagcccaggcgttccagcaccgctttttcttccggcgttttgccgtagttcataaagaagtcgtagatcttgtctttggtggtttcggaaagattcttgcgccagacgatcggatcgcctgggatcagcgggctcttccagatcaccttcagttctttcagcttctctggcgcggaggttttcagcttgtcgaggttttcggtgttgttggtggcaacatccacctgcttgttggcgacggccagcgcgttggtttcatgcccggcgttgacggtgcgcttgaagtcgctggcggagatattgtttttggcgaagacgtagtagccggggacgaggaagccagaggtggagttaggatcgccattgccaaaggtgagatctttccgcttcgccagcagatcgttcaggttgttgatcggactgtctttgttgacgatcaacacgctccagtaacccgggcttccatccgccgcgaccgtctgggcgaagacctggccattggcgcgatccaccgcttccatcgcgctcagattgccgtaccaggcgatatccactttattgaagcgcatcccctggataatgcccgcgtagtccggggcaaagaaggcgttgaccttcacgcccagcttcttctccatatcctgcaagaacggcgtccattgcggtttcaggttttgctgactttccgtactaataatgccgaaattcaacgccttttcctgctcttcggcgtgcgccgggcttaacagggtgctgaggctgaacatgctggtgaaggccaggctggcaattatcttagcgttcattcgttttcctcaatgatggggatgtcaggcagctttcgcgttctcttcgacgcggttaatgctgcggtagagatggtcaaaacgttcgttatcaaactgttggctgctgccgtcgtagaagacgtgcccctggcgcagggcgacgatgcgttcgcagtagcgcagggcgtaatccacctgatgcagcgtgacgaccacggtgatgccgtcgttctggttgatgtcgcgcagggtgtccatcacgatgcgcgcactttctgggtccaggctggcgatgggttcatcggccagaatcactttcgcctgctgcatcagcgcacgggcaatcgccacacgttgctgctggccgccggagagggtggaaacgcgctgatgggcaaaatgcaccatgccaacgcgggtcagcgcctgtaacgcgcgctgtttctgctcgccggtgaaccagctaaaacaggtgcgccagaacggcgtgctgccgagcgcgccaatcagcacgttctccagtacgctcaggcggttcaccaggttgaattgttggaatatgtagccggtatgggcgcggcttttgcggatatcgcgggccaggcggccttcgcgctggactgtgcggcccagcagctcgatatggctaccgacagatttatcgccggtaatcaaaccgcttaagtgacgtaaaagggtggattttccggaaccgctcggcccaagcagagccaccatttcaccgtgatgaatgttcagatcaaccgcatgcagcgcctgatgctgattgaaggttttggcgagcttctcgacacggataatcgtttgcatgatgcagcctccctaaaaaagtggctccatcgtggcggattattgtgacgatttggttaattaaaagtgactaacagatgaagagttaacgggaattcgatgacagtgcgggagggcgggcctcccggcgggttattgcgttggttgttgtttgacgacattaatcatccacggtacgccaaatttatcggtgactttgccaaagccatgcgcccagaaagtttcctgccaggccatttcgatttttccgttagcggcaagattgtcaaaccagcgttttccttcttcgacctgttggctatcgagcaccagcgtaaagccggagtagctggcttttccactcggcatggcatcgctcatcatgatgtcgcttccggcaatgcgcacattggcgtgggcgatggcggtatcgggaaattgcattccggaagggcagttctcggcgctgtcctgcgcactttttggcatttcgccgaagctgattttatagagcagttccgcgcccaacgtacgttgataataggcaatcgcgtcggaacagttaccggcaaaagagaggtagggacttaacggcatgatggtgacctcagttaagagaagccagttaagtgtagttcgaaatttatacagatgagaggcggcctgataagacgcgcgagcgtcgcatcaggcagtcggcactgttgccggatgcggcgtaaacgccttatccggcctacggagggtgcgggaatttgtaggcctgataagacgcgcaagcgtcgcatcaggcagtcggcaccattgccggatgcggcgtaaacgccttatccggcctacggagggtgcgggaatttgtaggcctgataagacgcgcaagcgtcgcatcaggcagtcggcaccgttgccggatgcggcgtaaacgccttatccggcctacggatggtgcgggaatttgtaggcctgataagacgcgcaagcgtcgcatcaggcagttggcactgttgccggatgcggcgtaaacgccttatccggcctacggagggtgcgggaatttgtaggcctgataagacgcgcaagcgtcgcatcaggcagtcggcaccgttgccggatgcggcgtaaacgccttatccggcctacggagggtgcgggaatttgtaggcctgataagacgcgcaagcgtcgcatcaggcatctggcaccgttgccggatgcggcgcgagcgccttatccggcttaccgatcacaatacaatcagttctttttcacaaactcagatttcagtttcatcggaccaaaaccgtcgattttgcaatcgatgttatggtcgccttcaaccaggcggatgtttttcactttggtgccaattttcagcatgctagagctacctttcaccttcagatctttaatgatggtaacgctgtcgccgtcagccagcagattgccgttagcatctttaacgatcagctcgtcgctttcctgtgcaggttctgcgtcgttccattcgtaggcacattccgggcagatgtacatgccgttatcttcgtaggtgtattcggagttgcattttgggcagtgtggtaaactcatgtggatttcctcaaaagtcagcagggcaaaagcgccaaaaaacggcagattgccgaaaaaggccgcaattatacacaaaatccctgagtttgtcgggggtactgctgattttagacgacgatcgttttcatttgaaaggaaacgcaaaaagaaaataatctttttgcctctatttattatttaagataatgttaatgctctacttgttctttttttaattcacatgatatttttatctttctgacgttttaaacgtatcagaagacgttatttattctgataaaaaacaacacactaaatataaaattatttcttgcagtaattataaaagccgaaaacagaactcaaaaacaatctggctaaataaaataacaaaatttgctttaaggaagaattttctatgtacacacagaccctgtatgagttaagtcaggaggctgaacgcctgttacagctttctcgccaacagttgcagttactggaaaaaatgcctctctctgtacccggagacgacgcgccacaactggctttaccctggagtcagcctaatatcgccgaacgtcacgcgatgctgaataatgagttgcgtaaaatttcccgactggaaatggtgcttgcaattgtcggtaccatgaaagcagggaaaagtaccaccattaatgccattgttggtacggaggttctgcctaatcgtaatcgcccaatgactgcgctgccgacgcttattcgccatacgcccgggcaaaaggaaccggtactgcattttagtcatgtcgcgccaatcgattgtttaattcaacaattacaacagcgcctgcgtgattgcgatattaagcatctgaccgatgtgctggaaatagataaagatatgcgtgcgcttatgcagcggatcgaaaatggcgtcgctttcgaaaaatattatctgggtgcccagcctatttttcattgtctgaaaagtttgaatgatttagtgcgactggcgaaggcgctggacgtcgattttcctttttctgcttacgccgccattgagcatattcccgtgattgaagtggagtttgtccatctagcggggctggagagttatcccggtcagttgacgttactggatacccccgggccaaatgaagccgggcaaccgcatctgcaaaaaatgcttaaccagcagctggcacgcgccagcgcggtactggcggtgctggattatacgcaactgaaaagcatctccgatgaagaggtccgtgaggcgattttggcggtggggcaaagcgtgccgctgtacgtgctggtcaataagttcgatcaacaggatcgtaacagtgacgacgccgaccaggtgcgggcactgatttccgggacgctgatgaaaggctgtattacgccacagcagatatttccggtgagcagcatgtggggctacctggcgaatcgggcgcgctatgagttagccaacaacggtaagttaccaccgccagagcaacaacgctgggtggaagattttgcccatgccgcgcttggcaggcgctggcgtcatgccgatctggcggacctcgaacatattcgtcatgctgccgatcagttgtgggaagatagcctgttcgcccagccaattcaggcgttgcttcatgccgcttacgctaacgccagcttgtatgctctgcgatctgccgcgcataaactgttgaattacgcgcagcaggcgcgggaatacctggattttcgtgcgcacgggttaaacgtcgcttgtgaacaattgcggcaaaatatccaccagatcgaagaaagtttgcagctattgcaactcaatcaggcgcaggtgagcggcgagattaaacatgaaatcgagctggccctgacctccgccaaccactttctgcgtcaacagcaagatgcgctgaaggtgcagttagccgccttgtttcaggatgatagcgagccgttaagcgagattcgtacccgctgtgagacactgttacagacggcgcagaacaccatcagtcgcgactttacgctgcgttttgccgagcttgaatccaccctttgccgggtgttaaccgatgttattcgccccattgagcaacaagtcaaaatggaattgagcgagagtgggtttcgtcctgggtttcattttcctgtttttcacggcgtagttccccacttcaacactcgccagctgttcagtgaagtcattagccgccaggaagcaacggacgagcagagcacgcgtttaggcgttgtgcgtgagacttttagccgctggttgaatcagcccgactggggacggggaaatgagaaaagtccgacagaaacggttgattacagtgtgttgcaacgagcattaagcgcagaagtcgatctctattgccaacaaatggctaaagttctggcagagcaggtcgatgaatctgttacggcaggcatgaatacttttttcgctgagttcgctagttgtttgacggaattacagacgcgtttacgcgaaagtctggctctgcgtcaacaaaatgaaagcgtggtcaggctgatgcagcagcaattgcagcagactgtgatgactcacggctggatttacaccgacgcccagctgttacgcgatgatattcaaacacttttcacggcagaacgatattgaccaagacgttacttgacggccccggtcgcgtgctggagagcgtttatccccgctttttagtggatctggcgcagggtgatgatgcccgccttccacaagcccatcagcagcagtttcgtgaacgactgatgcaggaacttcttagccgtgtgcagcttcagacatggacgaacggcggcatgttaaatgcgccgcttagcctgcgtctgacattggtggaaaaactggcgagcatgctggatcccggtcatctggcactgacgcagatcgcgcagcatctggcgctgctgcaaaaaatggatcaccgccagcactctgctttcccggagctcccccagcaaattgccgccttgtatgagtggtttagtgcccgttgtcgctggaaggaaaaggcgttaacgcaacgaggcctactggtgcaggcaggtgatcagagcgagcaaatttttacccgctggcgtgctggggcgtataacgcctggagcttgcctgggcgctgttttatcgttctggaggagttgcgctggggggcatttggcgatgcctgccgtctgggaagcccgcaagcggtggcgttgttgctgggtgatttgctcgagaaagcgacacaacatctggcagagagtatcaatgcggcaccgaccacgcgtcactattaccatcagtggtttgcctctagcaccgttccgacgggcggggagcatgctgattttttaagttggctgggaaagtggaccacggcagataaacaacccgtttgctggagtgtgacccaacgctggcaaactgtcgcgctggggatgccacgactctgtagtgcgcagcgtctggcgggggcaatgctcgaggaaatcttctctgtaaatttggcgtaaataatcagttacatcaatgagtcctaaacgaaatccatgtgtgaagttgatcacaaatttaaacactggtagggtaaaaaggtcattaactgcccaattcaggcgtcaactggtttgattgtacattccttaaccggagggtgtaagcaaacccgctacgcttgttacagagattgcatcctgcaattcccgctccccttttgcggccgtcgcgctgatttttctggcgtttgcggaaatgggccaactctgcgaggaaagctatgctgaaaaggaaaaaagtaaaaccgattacccttcgtgatgtcaccattattgatgacggtaaactgcgtaaagccattaccgcagcaagtctgggtaatgcaatggaatggttcgattttggtgtttatggttttgttgcttacgcattaggtaaagtttttttcccgggggctgaccccagcgtgcagatggttgctgcacttgccactttctccgttccctttctgattcgaccgcttggcggactcttctttggtatgttgggcgataaatatggtcgccagaagatcctcgctatcactattgtgattatgagcatcagtacgttctgtattggcttaataccgtcctacgacacgattggtatttgggcaccgattctgctgttgatctgtaagatggcacaaggtttcagcgtcggcggtgaatataccggggcgagcatatttgttgcggaatactcccctgaccgtaaacgtggctttatgggcagctggctggacttcggttctattgccgggtttgtgctgggtgcgggcgtggtggtgttaattagcaccattgtcggcgaagcgaacttcctcgattggggctggcgtattccgttctttatcgctctgccgttagggattatcgggctttacctgcgccatgcgctggaagagactccggcgttccagcagcatgtcgataaactggaacagggcgaccgtgaaggtttgcaggatggcccgaaagtcagctttaaagagattgccactaaatactggcgcagcctgttgacatgtattggtctggtaattgccaccaacgtgacttactacatgttgctgacctatatgccgagttatttgagccataacctgcattactccgaagaccacggggtgctgattattatcgccattatgatcggtatgctgtttgtccagccggtgatgggcttgctgagtgaccgttttggccgtcgtccgtttgtgctacttggtagtgttgccctgtttgtgttggcgatcccggcgtttattctgattaacagtaacgtcatcggcctgatttttgccgggttactgatgctggcggtgatccttaactgctttacgggcgttatggcttctaccttgccagcgatgttcccgacgcatatccgttacagcgcgctggcggcggcatttaatattagcgtgctggttgccggtctgacgccaacgctggcggcctggctggtcgaaagcagccagaatctgatgatgcctgcctattacctgatggtagtggcggtggttggtttaatcaccggcgtaaccatgaaagagacggcaaatcgtccgttgaaaggtgcgacaccggcggcgagtgatatacaggaagcgaaggaaattctcgtcgagcattacgataatatcgagcagaaaatcgatgatattgaccacgagattgccgatttgcaggcgaaacgtacccgcctggtgcagcaacatccgcgaattgatgaataagctgaaacggatggcctgatgtgacgctgtcttatcaggccaattgaactcttaaggttcacttaatctctgacgcgcatactctcctccaggttaacggaggagagtgcaatgaaaaaccgtgtttatgaaagtttaactaccgtgttcagcgtgctggtggtcagcagctttctttatatctggtttgccacgtactgatctttcttcagccgtacccaggcccgcgtgccggaagtctcttgccggttttgcaggaaaaactgcccgtgatgcaactgtgtaatgcggctgacaatacttaaccccagaccaatcccgccataacggctgtccatacgtacaaacgctttactcaactccccgcatttactctcatcaatacctggtccttcatcttcaactgccatgaccgctccgtcatcttcttgcagcttaatcataatgttgctgccttgcgggctgtaacgatgggcgttttctaccaggtttcgcaataacatccgcagcagggttgcatcaccctgaacggtgatgtcggcggcgctctctggcaatagcagggtttgctgtcgctggtcgagcatggtactgagttcgtcatagctggggagaatgacatcttccagcagttttacatgttgataattaccggaagaaaaactctgtccggcacgcgccagttgcagcagctgggagacgctctccatcatctgatcaagccgtgccactaacggtgctacatcaatgtgatgcgttttcgccagcagttccagatgcaaacgcacccccgccagtggcgttcgcagttcgtgcgcgacgtcagcggtaaacaacctttcgttatccagcgtgctggtcaggcgactgaccagatcgtttaacgcgctaaccaccgcttcgatttcgagggtggcgctgtgaatggcaatgggcgttaagttgtcggcggtgcgcgcttccagctctttttgcagctccgccagcgggcgggtgatgcggcgtaccgcctgatagcagataaatagcgtcaggctgaccataaagacgccggggacaatcaggctggcgaccgcctcgcggatctcacgcatgatgtggcgatcgttgttgcgattgtcgcgtagcgcctgctcaaacagctgaatctgctcggtactttcatgccatagccagaagacgctgatcagctcaaacaccaacaaaatggccccgatggtcaatatcagccgttggcgcaggcttattggtcggcgcagaaaatgcatcagattcaattagttttcctcattcgcgaccagcatatagccaaagccgcgcacggtgcggatacgggctttgcccactttgtcgcgcagattgtggatatgcacttccagggtgttggtgctgggttcattgtcccagttatagatgtcgttgtagagaatttcccgatgcaccggactgcctgctttgagcattaaccgactcagcagagcatattctttgggcgtcagaatcaactcttcaccgcccatccatacctgacggcgacccatgttcagcgtcagattgccaacaatcagctcactttcgccctgattattatggcgtcgtagcagggcgcggatacgggcatgtaactcttccagcgcaaaaggcttcaccagatagtcgtcggcaccgacatccagcccggcgattttgtcggtcagcgtatcgcgagcggtgaggatcagtaccggcagggtatattttttctgccggatacgggcgagaaaatgcagtccatcttcgtcgggtaaccctaaatccagtaccaccaggctgtaatgacctgcctcaaggctttgttccgccatccgcgcggttgtcacgctatcgcacgcgtagccttcggtttgcgccgccagaatcagtccctgcaataacagcgtatcgtcttcaacaatcagaattttcattcactcactctcctgcaagtttgcagaatatcatccgcagcctggtaatacttcgtctcaacgccagttaatcccaatagcgtggagaataaattgtcttgactatagtgttgcgtttgcgcctgtttttgcaggcagttctggtcaacctgataccgtttttgataatcctcgctcagccacagcagcatcggcacctgtttttggctatccggggcgatggcataaggcagaccgtgcagatagatgccattttcacctaagctttcaccgtggtcagaaagataaaccaggctggtggtaaatttatcctgatgttctttcagcagattaatcgctttatcaacaatatagtcgacgtaaaccagcgtgttgtcgtaagtgttcaccagttgctctttggtacaggtctggatctcattggtgtcgcaggttggggtaaatttcctgaactgaggcggatagcggttgtaataggtcggaccgtggctgccgatggtgtgtaagacaatcacgccatcaccttgcaggttattgatgtactcttcaagcccgtggaacagcacttcgtcatagcattcgccgttgatgcactgatcaggtagattcagcgcggtgacgttctggtgaggcacgcggtcgcaggcacctttacagccgccatcgttgtcattccacagcacgttgatgcccgctcgctgaatgatatccagcacgccttcctggtgctgtgccagctcttctttgtagtgctcacgcggcatatcgctgaacatgcacggtacactaactgccgttgccgtgccgcaagatgcggtattagggaaatagaccacgttatctttcgccagccgcgggttagtttcacgcgggtagccgttgagggagaagttctccgcccggctggtttcgccgacaatcaggatggtcaaatttttacgtttttcgttctgcattaacgggttgcggtgcgcgtcttcaccaattcgcaccagcggcagatttgccagtcgctgatgggagtaccaactccagctggcaacaatgctgttagaggggcttaaggatttcaccagctctttgttattgcggaacaagctggcgtagtctttataaaacagtgcggcgaccagcaaaatcagtagtacagaaaccagaatattggctccacggaaaagaacactgcgcagacggctggtggcaggtttgatttttatccagcaggcaatcagcgcagcaagcacgccgctgaatcccagcgttaataacatttgcggtgtcatcagcgcataactttctgccggagtggtatcaataatattggcaatcatgctgcggtcgatgacgatgccgtaagtcattatgaaatattgtgcagccgcgccaaccagaataaacaggcaggccagtggtcgattaagccataagaaagagcttagtgtcaggacaatattaatcacgctgaaagcgacgaccggcatgctcaagaaaaccagtacgttatgcaggctatccagcggcagcgcctgcaacacctgtttaaaaaaggcaatattcaggcagatagagatataaaaagcggccaacaatagccaggcgagtaaattcaaagagggtctttttagtaggcgcttcaacatcacggtgtttccatcgaacaaagtgcgcatatgctcgcaaagcaaaattaagccaaccttaagttcttaaggttggcttttatgtttgctggattaaggggaattaatctttgcttattggtgcatctaagggatacgggtttttatgtagccggttgtaattcagcgcatacatggcggtgatgaccatcagggtgacaaaactccacataacctctttcgctccggaccccaccacggcccagatgcagtagaggaaggcaatggtagtaactgccagatatgccgggcgtgctttaccaaagtgaccgtgtccgagcagcagtaacgccgcacaggtgtaaagatatggcaccagtgtaaagatgacgctgacggaagaaaccagaccgaactctttggtcgcgtttggactaatgctgctgagctggaagatggtcatcaaaataccgacgataatcagccccgccactggcgtacccgctttatttacacgggcaaaaatcggtgggaacagtccgtcatcggcagcggctttcgccgtttgacccgccagcaacgtccagccgcccagactacctaagcaacccgcagctgcgcagaaggaaacaatggccccggcggtgtcacccaacgccatccgtgcggcatcaccgaatgggctagcagaaacgcgcagtgcggcattagggatcatccccataatcgcggtggtagaaagtacatagcaaacggcggcaatcaataccccaccaatggtggcgatagggacattgcgtttcgggtttttcaccacacctgcggcaacggaggcactttccacaccgatgaagctccacagcgtaacgttaagggtactttgaattgcaccgaaggtgcccaggccgctgacgttccatgccgccatataggtttcaccacggaaccagaaccagccaaatacggcaatcccgacgatggggatcagcgccagcacggtggcaactgcctgcacacgggtgatcattttcggaccgacaatgttcagcaggacgaagatccacagcaccacgacgcaggtgatggttaataccaatggatctttcagaatcgggaagaagtaacttaaatatcctacgccaatgaccaccatggcgatattgccgatccagcaggccagccagtagaggacgttggtttgataaccgagaaacgggccaaagcagcggcgggcgtaagcgtaagaaccaccaggacttgggtcgaggaagctcattttggcgtataccatgctgagccccagtgcaccgataatcgtcaccaaccatccataaatggcaatcccgccagtagaggccaggtttgcaggtaacagaaaaacaccactccccataatattcccgctcaccatcagggtgacggggattaagcccactttgtgagcatcagcatcgctagacataattaaactcctgcgaaggcgagcttcgtgacaataaattacgtcatatcatacgcctgcattcgatagttgaattattatcgaccgggttatcgctgatgccgttattaatatagctcttcgttaaggttaaaaatcaggcgacagtgcgttctctgtgctgactaacataatgcagcggcgtcataccgtagaagtctttaaagacagaaataaagtagctcgtactgttgtagccgcaggactgacttacctgagagatatttttaccgtccatcattaattcatttacggcataacgcatgcggcaggtggtgattatttggctataactggtgttttcgcttttcaactttttctttaacagacttgggctaagacataaacaactggctaccatactaagattccagtctttgtgaatatcgctttcaataatttgataaacgctgtcacttacacaattacgtaacatatacatcattaaactaacgaattttttactgtcgagaaaacgggatagcaccgtgaataataatgcgcgtgttcgttccttttcactctcagtttctgcgggcatcatgctgtgttgcgcggcaacgcgaaagacgtctggcgtcaggcatggcagggtgagtatgggcgtagcgctacgttgccatactggtatttggctgagatctttattcagaaaccggaggtaatctttgatgatgtcgtgactaatatgagcaaccaaagtgttgttaagagaggagacgtcgataatattattttcacaatttaataacgccatatggttagctttaaggctaataggttctttcccattcacccttatccagacatctttttcagtcaataaaacaatacaaggttggtcgctgcaaatcctcatacatgtactcctgagtgcgaataaaagaccagttctcgctaaagcaaagcgataccgggaaatggttatataattgtatgatgaatataaacatgcataaaaataacgagttttactaatagtacaaatttttatagtaatttctcatgtacatatttttttacaggataaataacaggcaaaaaaaagcgcggggtggggccgcgcaaaaagtatgacatttttgtttgcagcaatttttatgaaaacgttgccatactcaaaaggcctaaggccaggcggcgtaatgttatttaaacaattacgccttcagcggaatagtggttacgctttcacgcacataacgtggtaaataccgtcaataatttcagtcccttcagtttcgtgttcaaatccagggaaatggtggtcccaggattgcaggctgcgtaaataacttacttgcggactgtttttatcgccgaagttttcaccagacagcagcatcgggattcctggcggatacgggataacactgtttgccgcgatgcgtcctggcagattttcaatggataccagttcgacattgttgtcgacaatcgcgttgtacgcttcacgcggggtgacttccgccaccggcaggccggaataggcttcgttcaaccgtgcgccagggttgttttctttcagccaggcaaacatggtgtcacccagatcgtgaatccccatgttcgcgtaagtgtcaggatattgttcaacaagttccggcatcacctgcgccagcggtgtgttggcgtcatagtggcgtttgaaggagcaaagggtgttaaccagagttccccatttcccacgggttacgcccatagagaacaggaacataatttggaagtcagtggtgcgggtaggtacaatgccgtggcgaccaagccaggcagtgaccagcgccgccggaacaccggtttcttccagttcaccatcttcacccattcccggagcaaggatgctgactttaatcgggtcgagcatactccagttatccggaatatctttgaagccgtgccagctttcgcccggatgcattacccagcagtcctgaacggtggtcagcagtttggttggtgcgtcagcaaagtcataggttttgccggtttgtgggtcggtgacgacttctttgttccacggtttgaagaaccagctaccgtcagcggtgaactctttatatagccgcgccatcgcctgacggaaatcaaccgcttcgtcaatcacttcctgtgtcagactcaggccgctgttgccgtccatcatgctcaccgccacgtcgttggatgcgcagatggcatacagcggggaggtggtggcatgcatcatgtaggcctggttgaagcgggagaagttaatcgccccacgaccttcacgtacatgaatataagaagcctgactcagcgcattcagcagtttgtgggtggagtgggtggcgaaaacggtaggaccgttgtgatcgccaggttcgccgcgcatggcatagtgatcggcatagatcgggttgaaacgtgcatagccgtaccaggcttcgtcaaagtgcagacgatcggaggttttttccagcagatcctgcgcttctttagcgttataacacacgccgtcataggtgcagttggtcaccacgcagtaagacggtttttgcccggctttgtctttggtcagcgggctttcactgattttcttctgcaaggtttcaggttgcatttcctgcggatagattggcccgataatgccgtagcggttgcggcttggcaccatatagaccggtttcgcgcctgtcagcatcaaaccttgttcgatggatttatggcagttacggtcaacgaccacgacatcgttatcggtcatgcaagcctgcatgatggtgcggttagagccggaagtaccgacgactacgctccaggagcgatcggcaccaaatacgcgtgcggcatatttttcgctttcgccaaatgcgccagtatggtcaagcaaagaaccgagggaagttcgttcgatgcccatgtcggtgcggaacagattttcaccatagtagtcatggtagaaacgtccggcgggtgttttggtaaaaccaacgccgccctggtggcctggcgctgcccaggaatattcatggatgtcactatatttcatcagcgcgctgaacagtggcggcaacagctgctggcggtagcgggtcatcgcggcaacggcgcgtccggcgataaagtcggcggtatcttccagaatccaggcgaattcatcgacaagctccagcaggtcgcgatccattgcggcgagggctttttcccgatcgcccaacaggaagaccggcacgttttgttggcgctcatgaagcttaccgatcaattgtctgacgttttgatgttcgtccggatgttccatttgatagctgaacatcaggcagtcaatggcttcgttactagagagaatggcaaaaccatcatcaaaggaggtggatttaatcacggtaacattttgctggcttaaagcatctgccagacgctcaacggcgttaccgacccaggtgtcttgatggagaaactcgctttcaacaattaatactttcatcattgcttacccggttatgaaggaatcttcgttgcgggcaagtatcttccggccttttcgggctgtaaagcgcgtgaaaaacaaacatttttgaaatatttagttttataaacaatacgttatgtgattattttaaattattttcactgcttattatcgacggctaaactatttttttggctgatactgatatcgtctttagccgggaaacgtctggcggcgctgttggctaagtttgcggtattgttgcgggctcatgccgacatatttgccgaacgtgctgtaaaaacgactactactacgaaagcctgccgtcagggcaatatcgagaatacttttatcggtatcgctcagtaacgcgcgaacgtggttgatgcgcatcgcggtaatgtactgtttcatcgtcaattgcatgacccgctggaatatccccattgcatagttggcgttaagtttgacgtgctcagccacatcgttgatggtcagcgcctgatcatagttttcggcaataaagcccagcatctggctaacataaaattgcgcatggcggctgacgctgtttttgtgtgtgcggctggttttattgaccagaatcggttcccagccagagaggctaaatcgcttgagcatcaggccaatttcatcaatggcgagctggcgaatttgctcgttcggactgtttaattcctgctgccagcggcgcacttcaaacgggctaagttgctgtgtggccagacttttgatcaccatgccgtgagtgacgtggttaatcaggtctttatccagcggccaggagagaaacagatgcatcggcagattaaaaatcgccatgctctgacaggttccggtatctgttagttggtgcggtgtacaggcccagaacagcgtgatatgaccctgattgatattcactttttcattgttgatcaggtattccacatcgccatcgaaaggcacattcacttcgacctgaccatgccagtggctggtgggcatgatatgcggtgcgcgaaactcaatctccatccgctggtattcgctatacaggctcagcgggctgcgggtctgtttttcgtcgctgctgcacataaacgtatctgtattcatggatggctctctttcctggaatatcagaattatggcaggagtgagggaggatgactgcgagtgggagcacggttttcaccctcttcccagaggggcgaggggactctccgagtatcatgaggccgaaaactctgcttttcaggtaatttattcccataaactcagatttactgctgcttcacgcaggatctgagtttatgggaatgctcaacctggaagccggaggttttctgcagattcgcctgccatgatgaagttattcaagcaagccaggagatctgcatgatgtctgcacccaaaattacatttatcggcgctggtagcacgattttcgttaaaaatattcttggtgatgtgttccatcgcgaggcgctgaaaacggcgcatattgccctgatggacattgaccccacccgcctggaagagagccatattgtggtgcgtaagctgatggatagtgcaggggccagcggcaaaatcacctgccacacccaacagaaagaagccttagaggatgccgattttgtcgtggtggcatttcagattggcggttatgaaccttgcacggtgactgatttcgaggtctgtaagcggcatggtctggaacaaaccattgccgatacgttggggccgggcggtattatgcgcgcgctacgtaccattccgcatctgtggcaaatttgcgaggacatgacggaagtctgccccgatgccaccatgctcaactatgttaacccaatggcgatgaatacctgggcgatgtatgcccgctatccgcatatcaaacaggtcgggctgtgccatagcgtgcagggaacggcggaagagttggcgcgtgacctcaatatcgacccagctacgctgcgttaccgttgcgcaggtatcaaccatatggcgttttacctggagctggagcgcaaaaccgccgacggcagttatgtgaatctctacccggaactgctggcggcttatgaagcagggcaggcaccgaagccgaatattcatggcaatactcgctgccagaatattgtgcgctacgaaatgttcaaaaagctgggctatttcgtcacggaaagcagtgaacattttgctgagtacacaccgtggtttattaagccaggtcgtgaggatttgattgagcgttataaagtaccgctggatgagtacccgaaacgctgcgtcgagcagctggcgaactggcataaagagctggaggagtataaaaaagcctcccggattgatattaaaccgagtcgggaatatgccagcacaatcatgaacgctatctggactggcgagccgagtgtgatttacggcaacgtccgtaacgatggtttgattgataacctgccacaaggatgttgcgtggaagtagcctgtctggttgatgctaatggcattcagccgaccaaagtcggtacgctacctagccatctggccgccctgatgcaaaccaacatcaacgtacagacgctgctgaccgaagctattcttacggaaaatcgcgaccgtgtttaccacgccgcgatgatggacccgcatactgccgccgtgctgggcattgacgaaatatatgctcttgttgacgacctgattgccgcccacggcgactggctgccaggctggttgcaccgttaaaacgcgactaaacgctactgcgccgggggatttattccggcgcacacctctgacgataccaataacagaaggcgggcgttggtaacagcgacccgataccctatgagcatttcaatgactacaaaactcagttatggatttggagcgttcgggaaggattttgcgatcggcattgtgtatatgtacctcatgtattactacaccgatgtcgtcgggctgtctgtgggtttggtcggtactttgtttctggtggcgaggatctgggatgctattaacgatccgattatgggatggattgtaaatgctacgcgaagccgatggggtaagttcaaaccctggatcctgatcggtacgttggcaaactctgtaatcttatttctcctctttagtgcgcatctgtttgaaggtactactcagattgtctttgtttgcgtgacctacatcctctggggcatgacttacaccattatggatattcccttctggagcctggttccaaccatcacgctcgataaacgtgagcgcgaacaactggttccttatccgcgtttttttgccagtctggcaggctttgttacggcaggtgtgacgctaccatttgttaattatgtcggcggtggcgatcggggatttggctttcagatgttcactctggtactgatcgccttttttattgttagtaccatcatcactctgcgcaatgtgcatgaagtctttagcagtgacaatcaaccgtctgctgaaggaagccatctgacacttaaagccatcgttgcgctaatttataaaaacgatcagcttagttgcctcttgggtatggctcttgcttataatgtagccagcaacattattaccggctttgctatctattatttcagttatgttatcggtgatgcggatttgttcccctattatctgagctatgcgggagctgctaacctggtgacgttagtattcttcccacgcttagttaaaagtttatcccgacgcattttatgggccggagcatctattcttccggtgttaagctgtggtgttctcctgttaatggcattaatgagctatcacaacgtcgtcctcattgtgattgcgggtattttgctgaatgtgggaacggcgcttttctgggtattacaggtcatcatggtggcagatatcgttgattacggtgaatataaactgcacgtacgctgtgaaagtatcgcttactccgtgcagactatggtggtgaagggcggtagtgcctttgcggcttttttcattgcggttgtgttagggatgattggctatgtaccgaatgttgaacagtctacgcaagccctattaggtatgcagtttattatgattgctctaccaactctgtttttcatggtaacgctgattctctacttccgtttctatcgcctcaatggtgacacgctgcgcaggatccagatccatctgctggataaatatcgcaaagtaccgcccgagcctgttcatgctgatattccggtcggtgcagtgagtgatgtgaaagcctgacgtggacaatagctaacgaaaatggcctgatgcgatatgtttatcaggccacgtcttaatgtaatgctttggatttgcaaattttgtagaccggataaggaattcacgccgcatccggcatcaacaaagcgcaagttgttatccggttatcaagccaaagcgccgtagctggcggcaatgaaagcgagcgaggaatatcaccgtcgttaatgcgccaagcagcgcgcagaacatatcggattgcgtgtcccactggtcgccctgggtgccgagaaaatcatccgctccctgacccattgccagcgctgcccaccactcgattaattcatacatcgcgcttatcgccagcgccacgcagcagaccaggaacgccaccattttacgtccgcgcacgtacatcccgcgaacgagaatttctcgtgccaccagtgcaggcaccagcccctggaaaaagtgccccagcttgtcatacggattacgactcaaccccagccattcctgcacctcaaaaccaacggggactttcgcgtaggtgtattgtccgccgaccatcaggatgatggcgtgaaggaaaatgagcgtatagagcagcggcgttaacggataacgtctggcggtggcaagcagtagctgcacgacaataatcaccggtgtcacttccatcagccaggtgagtttgtcatgggcgctaatgccggtataaatcaggattaacgttagcgtcagtgcgctggtgttaagaattaacggcttgagtgtgcgggtcatggtgagttcgcaaatcagggaaaatactgactattcaccagcaagcgtgaaattacaatcgcaaaagaggtggccagggggatcacctggcagcatgctgccaggcgctgggccgaagaggttacttagtgcagttcgcgcactgtttgttgacgatttgctggaagaagtcgttacctttgtcatcgaccaggataaacgccgggaaatcttctacttcgattttccagatagcttccatacccagctccggataagcgacgcactccagatgcttgatgctctgctgcgccagtaccgccgccggaccgccgatgctaccgaggtagaagccgccgtgtttatgacacgcgtcggtaacctgctgactgcggttacctttcgccagcatgatcatgctgccgccgtgggattgcagcagatccacgtaggagtccatacggcctgcggtggttgggccaagactaccacttggataaccggcaggggttttcgccggacccgcgtagtagatcgggtgatctttgatgtactgcggaagttctttaccggcgtcaatcagctctttcagcttggcgtgtgcaatatctcggcccacgataatggtgccggtgaggctcaaacgagtggataccgggtattggctaagctgggcgaggatctctttcatcgggcggttaaggtcaactttcaccgcttcgccttcaccggcctggcgcagttcttgtggaatgtactggcctgggttgtgttccagtttttcgatccagataccttcgcggttgattttcgctttaatgttacggtcagcggagcaggagacgcccatgccgaccgggcaggatgcgccgtgacgtggcagacggataacgcgaatgtcgtgcgcgaagtatttaccgccaaactgcgcgccaagaccgagtttctgggcctcttccagcagttcctgttccagctggacatcgcggaacgcctgaccatgttcgttcccttccgtcggcagttcatcgtaatagtgagcgcttgctaacttgacggttttcaggttggtttccgcagacgtaccgccaatcacaaacgcgatatggtacggcgggcaggctgcagtaccgagggtacgcattttctcgacgaggaagtttttcagtttgccgggagtcagcagggctttggtttcctggtagagatacgttttgttggcagagccgccgcctttcgcaacgcaaaggaatttgtactcatcgccatctaccgcgtacaggtcgatttgcgcaggcaggttagtgccggtgttgacctctttgtacatgtccagcgccgcattctgactatagcgcaggttatcttcgatataggtgttatagacgcctttgctcagcgtttcttcatcaccgccgccggtccacacgcgctggccttttttaccgacgatgatcgcggtgccggtatcctggcaggtcggcagcacgcctttggcggcgatttcggagtttcttaagaattgcagcgccacgtacttgtcgttttcgctggcttctggatcgtgaagaatagccgcaacctgtttctggtgtgccgggcggagcataaaagaagcgtcgtgaaaggcttgctgcgccagcagggtcagggcttctggttccactttcaggatggtttcgccgtcgaagtcggcaacgctaacgtaatcggaagtgagtagatagtattcggtattgtctttccccatcgggaaaggtgcctggtagataaagggtttgttactcatagcttccagcctgtaactctgtatttgttattcgaaaatggcgtgccgcgtagtcacgggcggcacgcaaagtgcatttataagaacccgtacatcgcggcgaagatccagccgaagacgcagcttacgctcacaccaatcaaccccggcagaataaagctgtggttgatgacgaagcgaccgatgtgggtggtgccggaacggtcaaactgaatcgctgccagatcgctcggataagtcggcaggatgtaataaccgtagcaagccggtgcactagccacgatgtatgccggatcaacgccgatcgccagcgcgaccggaacaatcgccgccagcgccgcagcctgagagtttacaaacttggaaaccagcagcagaacaatggcataggcccacggatactctttcaccatttcacccagtacgccctgaatttcagacatatgcgcaccgaacatggtttctgccatccatgcgataccgtacaccgccacgatggcgatcataccggaacggaagacttcgtttttactgatagacgcgggattggttttggtcaggataataatcagcgccccggtcagcagcataaacatctgaataaccagtaccatgctcagcggtttgccgccgaaggatggacgcaggtcgctatcagcaccaagaagggcgactacagcgattgccccgaggaaaatccacattgccagccagttgcttttcggcagttttttatccagcagcgtcgcggtatcaccgtaaacatactcacggttttccggtacggagatgaatttctggaactcttcgtctttatccagatctttaccgcggaaccagctgaagataccgatcgccaggataccgattaacgtgcttggaatggtgattgccagcagatcgaggaactcaagatggcgaccatcaaaggtgacattacccagcatcgcaaccagagacacgaccgcaacgctcaccggactggcgataatccccatctgtgcaccgatagaacttgccgccatcggacgttccggacggatgttgttcttaatggcgacgtcgtagatgatcggcagaatggtgtaaaccacatgacccgtaccgcaaagaatggtcagtgtacaggtcacaaacggcgcgacaatactgacatatttcgggttgcggcgcagcagcttctcggcaatttgcagcatgacatcaagaccgccgctagcttgcaaggtcgcgcttgccgccaccaccgcaatgataaccagcatgacatcaactggtggtttacctggctgaaggtggaagacgaagaccagaatgaccagaccgataccgcctaataaacccagcgcgataccaccctttctggcaccataaaacagacatatcagtattatgataagttggatagtaaataacatgtgtgaaccctcgcgataatcctatttaaatttttgctgaatagatcacagtcacgttctgttttgtatgaactgttttcagagcctgactaaatatccgtttggtcgttaccggctttagcaaatacctcacagtgaatattggctgattaaagcagcggcaaatttatgcactgtgataagcggctttttcagagagaaagactctctggcgatgggtttatagtttgtactgcgcagatgttaatgttttgtttgctgttatcttattgatatttatcggtctattttttgttctcagggcagatgtcattaggtttatagattaatctgatctacccatttgtgggtaaaaatacacataatgcgggtgacataatagttaattaacttttgttagcgttttgaaattaaaaacaccgttcacctgaagagatattaatttttagcgatgatggagggataattatatttgatctggcacaagttttactgatgaaggatgtaacttgtgccaggggtattttgcattacggtaataattattacttacagataaccagcgatccgttattggcaatattgtttcagtagactgtagtgttctgcctgaatacggtaacggtaaactggacgccccgtgacgccataatggatactggtgaacaagatgtggcagttgaccagccagatgaggtatttacggcaggaaacacggctaatgttaacctcgttggctagctcgtcggtactaaattcatagtcctgatgcgcgtcaatccactggcacagtgtgcgtaacgtctgcggcgttaagccttttggcaagcgacgaggatcctgttcgttggagctgctgccgtggattagctgatcaagctcggcctggtcataatactgatgtttttccagcgccattttcttttgccgccagccggtgagcgcctcttcaaagcgggaagcctggaagggtttgatcaggtaatccacgacaccgtaatgcaggctatctttaatggttgccgcatcggctgcggaggagatgacaatcacatcacttttgcaacgcgcgttatgcaggacaggcagtaaatcgagcccgttctctttttgcatatagatatcgagcaatatcaggtcgataggcgtatcgctattgaagataatctctttggctttctccagcgtgctggctgttccacagcattgaaagcctgggatttgtgctacgtatcggcgattcagctccgcgaccattgcgtcgtcatcgataattaatacattgatcatctgttgctcctctccccgtcccagggtatctggacaaaaaattgtgtgaaaatcccgggttcgctttccacggcgatgctgccgccgagattttctacctgttgtttgacaagtgctaaaccgacgcctcgctcgcttccttttgtgctgacacctttgtcaaaaatgtgatcgattttatcgggtgcgatccccggtccatcatcattaacttcacagtgcagccagccgtgacggtagtgcaatgttacgctaatttcgcctccgggttccggccctaatgcctccagcgcgttttctatcagatttcccaacgtggtaatcagcgtcgcgacctggtcctcactgccgctgtctggcagctggctttcactgtttaaaatcagcgtatggcctaaatcggtcgcgcggttaatcttgctgattaaaaaaccagcgataaccggagatttgatcttacccagcagagagccaatctcttcctgatagttattggctgttttgagaatgtaatcttccaactgcttataactcttcagatgcaataatccgagaatcacatgcaatttattcataaattcgtgggatcgttcacgaagtgcgtcagcatagttgaccagaccgtcgagtcgctgcatcagtttacgtacttcagttttgtccctgaaggtactaatggcaccgatgataacgccattactgcgcaccggaacggtgttgatcagtaatagccggtctttaatcgtaatctcttcgtcgcggcgcggggtaccgtcgcgtaacacttcgctgacatctaccacctgactccaactgtggcttagcgtgctcagtttctcatcgtcctggctcttacggtaattcagcaattcttgtgcggcatcgttgatcagcgtgacctcgccgcgatcgtccacggcaacgacgccttctttgatagactgcaacatggcctggcgttgctcaaacagcgtggagatttcgtagggttccaggccgaaaaggatttttttcagtaccttaaccagaatgcaggtgccaatcagtccgaccagcatgccaaataatacgctccagataatgctccagcgactgtcattgatctgttgggtcacacggcttaactcaaggccgatcgccaccacgccaatttgtttatgattttcatcgtagatgggggtaaatacgcgtaaagcctgcgccagaaaaccgcgattgatagcgacattttcttcgccattcagcgctttaaggatgtcatcacctttaaatggctgaccaatacgctgggcttcaggatggctgtagcgaagactttgcatatcggtaacgacaataaacagcagatcgttgcgtttgcgtacggcttccgcgatggcctggatgccactctcctgcggttttttctgcaagccctgacggatttccgggctgtcggcgagggtacgcgccactgccagtgccttgttggctagcccatctcgcgtcatatcactgatttggctgaagtaaatcagatgcaccaccaatagcacgctgaacagtaccgcactgaccattaagatcactgtggtactcaatttcatcggacgtttgcgtaacatgcggtagggcaaactatgtctcatcagcttccttgtgtgacaaatttcttaagcattatctctgatgaggcgggtaattcaaagggagtaagaatgattggctatataggggaagagactctggcaacggaaactgccagtgctgtatgaagattccggggctatgcttatagcgataatcatactgatgagagagggaaggtcatggatcaggcgctactggacgggggttatcgctgttataccggcgaaaagatcgatgtctatttcaacactgcgatatgtcagcattctggcaattgcgtacgtggcaacggcaagttatttaatctcaaacgaaagccgtggatcatgccggatgaagtcgacgtcgccactgtggttaaagtgattgatacgtgcccgagcggcgcgctgaaataccgtcataaataagcgagggtaaaatggaaatacgcgaaggccacaataaattttacattaatgacaaacaaggcaagcaaatcgctgaaattgtctttgtgccgaccggagagaatttagcgattatcgaacataccgatgtcgatgaaagcctgaaagggcaagggattggtaaacagctggttgcgaaagtcgtggaaaaaatgcgtcgggaaaaacgaaaaattatcccattatgcccatttgcgaaacatgaatttgataaaacgcgggagtatgatgatattcgcagttgatgggagagtacagagtcacgatatttttcattctctccgcgatgtgatgcaggagagcatctgaagggtagggggatgcacaaagaatgggcagagagcgcgtttttttgtcccaagtcatcccctttactgagcaaaaaaaagaatatctcctatatgagaatcatcaatcggggttaataagttttgcgtccccagagcgtttaatattgataggagtcatattatggaaggtaaaaacaagttcaatacttatgttgtttcttttgattatccaagttcttattccagtgtgttcttaagattaagaagtttgatgtatgatatgaatttctcctctatcgtggctgatgaatatgggataccacgacaattgaatgaaaactccttcgcaataacgacaagcttagccgcaagtgaaatcgaagatttaatcaggctcaaatgcttagacttaccggatattgattttgacctcaacattatgacagttgatgactatttccgtcagttttacaagtaaccaggaaggataagaagaacataaaaaatggcactattctctaaaatattaattttttatgtgattggtgtgaacatatcctttgtcattatctggtttatcagtcatgagaaaacacatattcgtttacttagtgcattcctggtcggaataacctggccaatgagtctgcctgtggcattacttttttctctcttttaagagctgtagttgagtggacccgctggttatcgtgaaacgaagcgtctctcctcaaaactggatttgcggaacgatgaacgaagcagtcgcctgactgcttcgttcattaaagtgaaatttatttctgtgggcgcatcgccgggaagagaataacgtcgcgaatagtatggctgttagtaaacagcataatcattcggtcgataccaatacccagaccagcggttggcggcagaccatattccagcgcagtcacgtaatcttcgtcatagaacatggcttcgtcgtcacctgcagctttagcattaacctgttcctggaaacgttcagcctgatcttctgcgtcgtttaattcgctaaaaccattaccgatttcacgaccaccgatgaagaattcaaaacggtcggtgatttccgggttaacatcattacggcgtgccagcggggacacttctgccggatattccgtaataaaggttggctgaatcagatgtgcttctgccacttcatcaaagatctctgtgacaatacgtcccaacccccagcttttctctaccgtaataccgatagattcagctaatgctttagcagcatcaaaattatccaggtcggccatatcggtttctggacgatattttttgattgcttcgcgcatggtgagtttttcaaacggtttgccgaaatcaaacacatgctcgccataagtgactttagtggtacccagaacctcttgtgccagggtgcggaacagactctctgtcagttcaatcaaatcgtggtaatccgcatacgccatgtagagttccatcattgtgaactcaggattatggcgaacagaaataccttcattacggaagttacggttgatttcgaatacccgttcaaaaccgcctacaaccagacgtttcagatacagctccggcgcgatacgcagatacatatctaaatccagagcattatgatgggtaataaacgggcgagcagatgccccacctggaattacctgcatcatcggggtttctacttccataaagccgcgcgcgaccatgaattgacggatagcggccagaattttactacggacaacaaacgtttgacgggatttatcgttagcgatgaggtccagataacgttgacgataacggacttcctgatcctgcagaccatggaatttatctggtaaaggacgtagtgctttagtcagcaggcgcagctcagtacagtgaatggaaagctcacccgtttgcgtcttaaacagcgtaccgcgggcaccgataatgtcacccagatcccattttttaaactgatcgttataaacaccttctggcaggctatctcttgcaacgtacagttgaatacggccaccgacatcctgcaacgttacaaaggaggctttccccatgatacgacgggtcatcattcggccagcaacgctgacttcaatgtttaaggattccagttcctggttatccttcgcatcaaactcttcgtgcaactggtcagaggtatggtcgcggcgaaaatcattgggaaacgccacaccttgctgacgtagtgccgccagtttttcgcggcgatttctcagttcatcgttaaaatcaatagcctcattggctccccgtgtttcttgttcagacattttggttcctctaaatccagctttcaatttagcgtagataaagagacagatcggtacactgtattatctgcctcgactattagtaactcagtttatcttatcgaaactaacgcttacctcaagttgatatcactaataaataaccatcaaaatggtttaaatgacttattaatctcgatttgttagtgttataaactaaaagttaatttattcataaccaattgtttttacgacagttaatcgttgctctcctgtatcatattcgtcggcgtgctaaacagaaaacgggtagcaaaggccaatacgacgatgatcgcgacacaagccaacgtccactctcccatctgagaaaagaatcgctggtaagctgcaattgccataccgctaatttggctctctgtcgtctgctgtgccacgacgcctgccagccagttggcgaccgcgcctgttgccagcatataaatcccggttaatacgccagacattttcagacgcgtgatttgcgcaatcgccaccgggtcaataaagagttcggcaaagcccattagcgccagcccggatatcatcacgcccatactcgcttgaccgtcagccgctgcatgtcgggcatcaaatgccaacaacataaagccacaagccatcagcagtaagccaaaggcaaacttcagccagacgcgcaatgtactgttgccgcggctttctgggctcgccagccaggccagtacaaccccagcgagcatcaccgcaattgcattcacgctctggaatagtgctgtaggtacttcaatattgaatgcctgacgattcacaaagcgatcgataaacaagctgatggtactgccgccctgttgtgccagtacccagaacaatgtcccgacaaacatcaacaatacaatttgccaaagagcacggcgatgttcggggaatttgatcatcatgcgggcaatgatttgtgcggcaatgaggcaaacgatcgccagcaaatatccggaccagtcgttctccagcagcagagtaaaaaatactggggctaaacagagcatcaccactaaccagctccatactggtaaggcaaatttgacactagtgagcgcttttttatccatactacgtgtggactggaaatgacgatgaccgcttaagaaaatcaacaaaccgataaacatgccgccacccgcaagggcaaagccaacatgccatccataccactgagcagccaggccgcaggcgattggggctgcgatagaaccgatattgcccgcagcatacagcaggctaaaaccgccatcacgtcgatgatcgttctcgtcgtagagctcgccaagcaaacagctgatgttacttttgaataaaccgtagccacaaataatgattgccagcgccagatacaggctaaaggtactatttgtatcaatacccagcaccacatggccaagggtcattaacagcgcgccggcaatcactgcagtgcggttgccgagcaggcggtcggcaagccagccgccgagaataggggtaacgtaaaccagagaagcatatgcgctgaacaggctgatggcatggttatcatcaaaaccaagctgatgggtgagatagagaatgagtaaggcacgcatgccgtaaaaactgaagtactcccagatttggatcgccacgatatagtatatcgcgcgcggctgactgggtgttttcatgtgttctccttatgagcaaaaaagggaagtggcaagccacttcccttgtacgagctaattattttttgctttcttctttcaataccttaacggtatagcggccatcagcctgacggtatgcaccgtgaatatcggtttcaaagcccggatagtgagcgccgatttcacacagcatctgcaggaactccagaaccggacggctttcttcggtgatcatttcacccggcattaccagaggaactcccggcgggtacggaaggatcatattggcgttaatacgacctaccatttcgtcgaggtaaacttcttcggtcataccgtgcagctctttctggaatgcagcatacggagtcattaccatcgtcggcagcacttcaaatgcgcgatacatcagatccggcagattgtggtgaacaatcagtttgtggatattctgagccagttcctgaatacgcatgttttcatagaattcaggatcttcacgatacagagacggcagcatgtttttcacacgcaggttcaggtcgaacgcacgtttaaagtcagtcagagcacgcagcaggctcagtgctttggtcttatcgataccgatgctgaacaggaacagcaggttatacggaccggttttctcaacaacgatgccatgttcgtcgaggtatttcgccacgatgctggccggaataccaaagtcgctcatggtgccgtctttttccatccccggagtcagcagggtgactttgatcgggtcaagatacatgtgctcgttatcgatgtttttgaagccgtgccaggtgctgtcagaacgcagcggccagcattcagtcgtatcgatatgatccggctgccatacatcaaagaaccagccatcagattccgttctcagacgtttgatctctttacggaatttgatcgcacgttcaatagaaccgttgatcagacgcttacctgcattgcctttcatcatcgccgcagcggtttcagtggacgccacgataccgtagtgcggagaagtggtggtgtgcatcatgtaggcttcgttaaaggtttcttcgtttacgtcacctttaacgtggatcatggaagcctgagagaacgccgccagcagtttgtgagtggactgggtttcgtaaatcactttcccttctacacggccaccgctcataccgcatttaccttcgtaaatcggactgaagttggtgtaaggcacccacgcggagtcaaagtggatggatttcacatccagtgttttcttgatgaagtcggtgttgtacagcagaccatcataggtagagttggtaattacagcatgtaccggccaggttgcgtttggtgtttctttcacgcgcttagcaatggtagcgtgctggaattcactctgtgggataccaccaagaataccgtaagcgttacgggtcgggcggaaatagattggcgtaacatcgctcatcatcatcaggtgggtcaggcttttgtggcagttacggtcaatcagaatggtgctgcctgctggagcagagtacataccaacaattttgttcgcagtggaagtaccgttggtcaccatgtagctgcggtctgcgttaaagacgcgagcgatatactgttctgcttctttgtgtggaccactgtgatccagcagagaacccagttcagatacactaatggaaatatcagatttcatggtattcggaccaaagaaatcatagaacaggctacctaccgggcttttctggaatgcagtaccgcccatgtgaccaggagtacagaaagtatatttaccttcacgaacatatttaaacagtgctttagtcagcggaggcagaatagtgttgatatattcgtcagtggtctgcttgatcttattagcaatatcttcagcagcacccagcgcatattcaaagaagctaatctgtaaacgcaggtcattcaggcttacatcgagagtggaatacgtattagcgaacgcgtacaacggcaggttctcgttcattttgctaatttcttcgcacagctcgagattatatttatcccagtcaaaaataacgccgcacagacgcgcattgttttcgatcagttttaataagtcgtcacggtcgttcgggtaaacaatctggaagttcagacgttcaagcgcgcgatgaagttcacggatgggttcttctttaaaataaacccccatgtgattcaatattgcaataacgttcatagtcatatctccaggtaaaaaaggcccctcccaacacatgggacaaaatgaaaggaggagcctcggaaaatacttttaattaatgtgcgttagacgcggtgtggttatccatactgtggctctggcgctcgtgcattttgcgagcgtagaacatcaggataatcaggctgacgatgaaggtacctgccagctcgaaggagcttgcgcccatcagcgcgatgaagcagaacacgcaacccagtacagagcagatcaggctgacaaagttgcggatgttaacgccttcaaaacgaatcaggtcaacgcaagagtagaaatacggcagcatagtcagcagtactgcgataccggtcagttcaccgaacaggtcagatgctttaccaccggcagagttcatcagagtgataaggatcatcagggcagtcattttcactgcagccagcagcagaccttttttcggaataccgttgctgtcgacttcaccataaactttcgggaagttaccgtcgttagcggcacgtacacctgcctggcctaccaacatcatccaggagcccagagaagtcaggcacgcaaaggcggtgaatgcagaaaccagcggcgcagcccagttaccgaggatagtactagcactgattgcaaacggagcaccggaagccgccattacagaagacggatacataccggaaagcacctgagtcgcagcgatgtaaacaatacctgctaaaccagtacccagcatggttgccagcggaacggtacgtttcgggtttttaaccataccagtacttacagctgcggattcaacacccacgaaggcccacaggcagagcagaatacttttaatgatcgcatgaccatcagtggtatccgcagtattccagttagctgcataagttgccgcatcaaaccaatgccagccaacaatagcagtcatcaccacaggaataagaaccagcaccagaccaatagtggttaaacggcttacccaagtaccgccgagcatatttacaaaggtaaatacccagacgatagcaatacaggcgatacccgccggaacaggatcatttaatactgggaagaaggtggaaagataagatacagcggtaataccaatcgccaggttaccaatccagttagcatggtaataaagaacacctgtctgaaaaccaaatgcaggggaaatttctccggcataagcaattgggccaccttgttgcgggttttttgttgccagtcgggcatatacatacgccaggctcattgcaccaataatagagataatccaaccccagatagcaataccaccgatacttgctaggttcgcaggtaataatgcaataccgctccccatcatattaccggcaacaacaccggtacaggcaaatagcccgatcttcttggcagaactcatgctcttctcctaatttcatttttgaatttggagtccgggtcatgatgtataactatttcctgaccagaccaaactggcgataagattactcacgaaaaaaggattaatcctaaagattaggtgaaataacacaaaagtttctgtaagtgagaacttgaggttttttattaacacatcaggatcgcaagttgatatcatgaaaagataaacatttaatgtttacaatggattgcgtgacattctctggttaaatttatgtaataaaaattatgcggcaaataaattgccgcaacatattataccaacaggaacatacaaaaactcaacaacaaatatttccgagcataaatcaacccggagttacttattcactagcaagaaatttgtcgagataaggtacaacataaggaacagaagtctggaatataccattttcaatccagtaaagggtgtttgcccctgggcgtaaattaaaggcggtgagatatgcatcagctgcttcccggttcatccccttcatttcataaaccttgccaagcaacacataatttagccaggacatttcaagatcaatgccagtatttatcgcctggtaagactcatctgttttaccttttaccagagcactgaccgcttttatttgatatataatggacaggttgttcaattccggcagtgtaacaatgttatctatttctgtgttcagtgctgctaattgtttttcatctaaaggatgttgagaatggcgcacgatatcaactaatgctttttctgctctcgcgtaggtaaattctggggaactttgaacaatctcacctaataattcactggcacggttcaaacttttatcatcgccatgcagtaaataatcatgtgcctgataaaaattagttaataacgcaccacgatgcggcaaaattttctggagcgtctcctgcattcgttgtggccacggttggtttaacgctttacttaaactctccagtaaatcattttgaatcgccagctgattaccgttagtgatgacataacgtttatccagcatggtactaccatctgcattgtctaccaattttatgctcataaagcattgttgagcacggtattggcgctgattaacaaacgcaatagataatgttttaccggaactgctcggttcatcaatgttgtagttgattttgtcatgcaccataaaggtggagaaggtgttaagacttgtcgccaccaaatcacccacgcctatcgcgtaagagagctgatacggggaactccagctgttacaacttttatttaccatattaatgtcaatatcgcgtggattgagcaaaatacggcttttgctcataggaagacgtgtatcaagactactaaacgctaccagtgctacacagatacctaagctcaacaggaaaaaaaaccatacccaaaaggtagtgaatcgtttgcttttaactggggattgttcaggtggcgttgcggtgttttgaatgttaagactgtgggagggagaatctgtggcaggaaccgcctctggtatagggggagggctagatagcattatttcctctccctcttcttcgctgtaccagataaccggcaccattaatttatagccgcgctttggtacagtagcgatatagacaggactatcttcatcattatcttttaaactcttacgtagttcactgatactctgcgtcacaacgtgattggtgacaatacttctcttccagacattatcgataagttcatccctgctaagtacttcgccactgtgttgagcaaagaaaaccagaagatcgattaatctcggctcaagggtaagttgacgcccattgcggctaatttggtttatggacggagtaacaagccattcgccaacgcgaactacaggttgttgcataatagaaactcattcgaaaagggaatgatgcaatgataattgccacaacctatttttaccatctatagatgggtttatttacatattattggtgaatgcaagacgttatttttaccagccataaacttcttgattacatagtattacgaaaggattttactgagaaccagaagtaatattccttaccatcaaaattcatcatctttgccaaagaaaaatgttcagaaaataatccatggaaaattgtccggagcacttactattttaatggattgttagtctttgcatgagcaagcgaactgatacatttctctttgttctcattcagaaaatctcatcagtcgccgttcagaccggtgttgtgctttatggatgcgttacgctcctgatgacgtcatttgacgttcaacagcatcacggggccgcacgacatttcacgtcagttagtgctatagctcaggaacaaattttcccgaattgggatatgcccgcaaattgctggtgatgtggggagaatctggttgagttcggtagaattgatttggaggcagaacgcttaaatcgtggcgtcctgaaacgaaaaacggacctccgtggaggtccgtttatatgaatttggtgcccggactcggaatcgaaccaaggacacggggattttcaatcccctgctctaccgactgagctatccgggcaacggggcgcattaaaccgtaatctgcacatctcgtcaacctaatttcagtaaaagcgattcaactgcttaagattgcggcaaatcgcttcttttctgtgtttctgtcaggtcaatgcaccaccctggcggcagcgggcgaagcgcaggatatcttccgccagccgatgtgcagtgtcgacatccgcctggctacgattcaccagcattcggcttaaacagccttccagcaccagttccatctgctttgctaccatcgccggatcgtcaacttccagtgtggttaacagttcgtgggtgaaatcgtaggccgcgcttttttgctgatcggccagttgatgaatagggtggccaggatcgggataaaacgtacaggcagcgataaatagacagcccggatagcggttgtttttaacgcactcgcttaacgcctgataacgtgccagcagcttttgttcggcggtttgcgtttcgtccagcatcagctgacgacgccagacatctatctgttggctaagataacgcagcgcatcgtagaggattgcctctttgtctggccagaagcggcgtagctcgtccagtggataatccacacgttcagcaaccatctccagcgtggtgttggcaatcccttgtaattctaataatttcagggcttctcccagtacatcttcacgttgcacgctattttcctccgtctttcccactgcaagtgtcgttcacggttggcgatcgcgcaaatgtgcgctgaaggtttcagcatccataaagcccgtgacgcgtgcttgtggatgctcctggccttgtccgtcaaaaaagagaattgtcggtaggccaaggacattaagatgctttaacagcgccacatcttgtgcgtcgttggccgtgacgttggcctgaagtaagaccgtgtctgctaacgctttttgcacctgcgggtcgctgaaggtgtatttctcaaactctttacaggcgacgcaccagtcggcataaagatctaacatcaccggtttgcctttggcttcaacgagcgcctgatttaactcatctaccgttttgatttgtgtaaagttgagatgcgtctgagtttgcgcggtatgcgtcgcaccaaatgcccaatcctgaagtgggcgcacgctaaccaatgccgctgccagcagaataatttgcacaatacgcatccagccgcgtttagcctgtaggctggtgataaaggcccagccaaagaatgcgacacccagcgcgctccacaagcgtaatccccatacatcaccaatcactcgctccagcaggaagaccggcagtgcgaggatcacaaaaccaaacgcggttttgacttgttccatccacgggccgcttttcggcagcaagcggttaccaaagacggtaattagcatcagcggcaggcccatgcccaacgcatagagataaagcgtgccgccgcccagccacatgttcccgctttgggcgatatacagcagaatcgcgctaagcggtgcggtggtgcatggactacagatcagtccggcaatcgcccccataacaaacacaccgccaggactgccgccctgttggcgattgctcatcaacgtgagacgtgtttgcaggctagaggggagttgcagggtaaacaagccaaacatactcatcgccagcaaggtaaagacgatggcgaggccaatgagcacgtatgggtgctgtagcgccgcctggaactgtaaccctgcggcggcaaccaccagacccagcgccgtgtaggtcagcgccatcccctgcacataaataaaggtcagcaacaatgctctggcagtggagagccgctgtttaccacccagcacgatgccagaaatcagtgggtacattggcagcacgcatggcgtaaaggcgataccaataccgatcaacaacgcccagagcgcggaaaagggcaattgcgcggtgggctgctcttgctgcggaacagacacaggctgtggcgctgcgttgttggcgaccacttcgcttaacggaacggttttggtttctggcggataacagaaaccggcatcagcacagccctggtaggtgacagttaacgtcgctcccgcactcgcctggttgatggtgacgggaagcgtcagccgatcgcggtaaatctcgcttttgccgtaaaactcatcttcatgccagacgccttgcggcagctgcacgtcggcaattttcgcgtgttccggcgtaatgcggatctgtttacggtagaggtagtaaccgtctttgatctgccaggtcagattaaggtcatgttggttttgctgaaaatcaaaagcaaaggcttgatccgcggggacaaattgactacgtcccggcgcgtcgaataatccggcaaaaacggaagtgctgcaaagtagcaggatcagcgtaaagatgcgttgagccatgagaggtaatctgtgtctccttatgtcagcgtaaagatgcgttgagccaactgaggtaatctgtgtctccgtgtgtaacaggtaaaaccagaagttccggggtttgatatggatgatgagacttcaggcattccagcagtgcctgctggtgagatacggtagtttttaaaatcatctgcacttcgtattcttgctccagcttaccttcccagtaatagagagaggtagcgccggggatcaaggtcgcgcaggccgccagtttttccgccagcactttggcggctaaatcctgggctgtcgcttcatctggtgccgtacatagcaccacgacagacgcggtattgctacttttttcatcaagcataaacacctcgcaagaacagatggaaccgcaagagagaggtcactatacaacggacgggggaaggatgttagtcggcgggaaagaaagcggggcgtgaacgccccgcgattgatcattacagcatgaagctacccagcacgaagccgaagcaaacggccagggcaacacccagagtacccgggatgaagaacggatggttgaagacgaatttaccgatacgggtagtacccgtgtcatccatctgtaccgcagcaaccagcgtcgggtaggtcggcagaatgaacagaccagacaccgcagcgaaagaagcaacagcggtcagcggactaacgttcagtgccagagccatcggcatcagtgcttttgcggttgcagcctgagagtacagcagagcagaagcaaagaagaagatgacggccagcagccacggatgaccctgaatcacttcaccagcggtatctttgatccagtcgatgttgttggaaacgaaagtatcgcccagccacgcaacacccaggatacaaatacaggcgctcatacctgctttgaaggtgctggagttgaggatgttgtcggtatcgactttacagataacggtggtcagagttgcaacgctgagcatgatgatcaggattgcgttggtggtgttcatcagcggtttttcaaccagacccatgcttgggctgttgatgattgcatagataaccacgccaactacgcccagcaggaacagccagacggacgtttttgcaccggatttgatttcaatctgcttttcaccgcgcagttcaaccaggccctcttccagacgcttgcgataaatcggatcgtcagagagtttggagttgaacagcatagtgaccaggaaggacatcaccagaaccgccagcagggtggacgggatgaccacggagagcagatggaggtagctgatgccatgaccttccatcacggaagacatgtaaaccactgccgcactgattgggcttgcggtgatcgcaatctgcgcggataccactgcagtagacagcggacggcaaggtttaacgccttgttccttcgcaacttcagcgataactggcagtgtcgccagagagatgttgccagtaccagcaaagatagtcaggaaataggtcacgatcggtgcgaggatcgtgatgtatttcgggttacggcgcagcagcttttctgtctgatgaaccagatagtccagaccgccagcaacctgcatggcagaaatagcggcgataaccgccatgataatggagatgacatcgaacgggatgttaccgggtttaacgccaatagcggcaagaaccagcacccccaatccgcctgcaaaaccaatacctattccccccaatctggcgcccaagaagatcgccagcaaaactatgatgagttctacaactagcatattagccttccttgttttttaacaagttgatattagattgttatttttaagttactgctcacaagaaaaaaggcacgtcatctgacgtgccttttttatttgtactaccctgtacgattactgttcgctttcatcagtatagcgttttgctttgtaagccgggtgcatcagattctgtacggagaaaatatcgtcaagttccgcttcagtcaacagaccgcgttccagaacgacttcacgtacactcttaccggtttcggcacagattttacccacgatgtcaccgttgtggtgaccgatgaacgggttcaggtaagtaacgataccgatagagttgtaaacgtaaccttcgcacacttctttgttagcagtgatgccgttaatgcatttttccagcaggttgtagcaagcgttggtcagaatgtgaacggattcgaacatggcctggccaatgaccggctccataacgttcaactgcagctgacctgcttctgctgccatggtaacagtggtgtcgttaccgatgactttgaagcatacctggttaaccacttccggaacaaccgggtttactttagctggcatgatggaagagcccgcctgcagttccggcaggttgatctcgttcaggccggcacgtgggccactagagagcaagcgcaggtcgttacagattttggacatcttcacagccaggcgtttcagcgcgccgtgaaccataacataagcgccgcagtcagaggtcgcttcgatcaggtcttcagccggtacgcatgggaagccagtaacttcagccagttttttcactgccagcggagagtactctttcggcgtgttcagaccagtaccgattgctgttgcaccaaggttaacttccagcagcagttcagcggtacgttggatgtttttcacttcttctttcagcaggatgctgaaagcgcggaattcctgaccgagggtcatcggtactgcgtcctgcagctgggtacgacccattttcaggatgtcctggaattcgacagctttacgttcaaagccttcacgcagttggttaatcgcatctaccagcttaatcagggaagagtaaactgcgatacggaaaccggtcgggtaggcgtcgttagtggactgacatttgttaacatggtcgttcgggttcaggtactgatattcacctttttggtgacccatcagttccagaccgatattggccagcacttcgttggtgttcatgtttacggaagtacctgcgccgccctggtagacgtctaccgggaactgatccatgcattttccgttgttcaggacttcatcacatgcggcaatgatggcattcgctacacttttaggaatggtttgcagctctttgtttgccatagctgcggcttttttaaccattaccataccgcgaacaaattcaggaatatcactgattttgttgttgctgatatagaagttttcaatcgctctcagagtgtgaacaccatagtaggcatcagctggaacttccctggtacccaacagatcttcttcgatacgaatgttgttactcatgtgaaccttctttttcaagctgccaatgatttgctttaaacacacagaatatatgtggtttcgaatgtttttcgaccgacgattatcccctgcatcgaccgaatacccgagatcatatgctgcttgaggatttctaccgtaatctggatcactttaagtgtcggtttttaccccttaattattaatttgtgaaatagatcaccgctttgggattactaccaaaaatagttgcgcaaacatcttgaaattttgctaatgaccacaatataagctaaacgcgattcgcaacccattcaggtagccggggttaaccggctgctattacaggagaaacctttgcgctggttaccttttattgccattttcctttatgtctatattgagattagtatctttattcaggttgcccatgtattgggggtattgctgaccctcgtgctggttatattcacgagtgttatcggtatgagtctggtacgtaaccagggctttaagaatttcgtgctgatgcagcaaaaaatggcggcgggtgaaaacccagcggcggagatgattaaaagtgttagcctgatcattgctggtttgctgcttttattaccgggcttttttaccgacttcctcggtcttctacttttattgccgccggtgcaaaagcatctgacagtgaagttgatgccgcatttgcgcttttctcgcatgcctggcggcggttttagcgccgggaccggtggcggtaatacttttgatggtgagtaccagcgaaaggatgatgagcgcgaccgccttgatcataaagacgatcgccaggattaatgtcgaaacgccggattatgtggttatgccattttccggcgtttttcgttttggcagcaacagccataaccccgccagcatgatcagcgcatagagacttttccagccgaccattgccagtaacagaacgcataacagcccgccaaccaccgccagtagtcgataacgtccttgcaataatttacagcctgccagcatgcataacagataaatcataataaagatgccattggcataaataataagagcgtccagattgatctctaaagcatgaatcaccaaagtgctcaccacacagcagccgagcaccgcattgagggcattattcgggatatggcgagaagagaggcgtgccaggtagtggtcaggattatgttgcgcctggctccagaccaggcgggcgaagctctgtatataaatgttgagactggcaaagcaggccagatagccaatcacgcaggcaatccataacgctcctacaccgaacaactgcactacaatttttggaaggcttgctgccgccgccattttttcaccataggcgtcgaagtgtaagacgactaccgtacagccccagtagactaatcctgccagcagcagaccaatcatcaaagcacgaggaaaatcacgctctggatttttaaattcgctggcgagatgggcaaatgcctccagaccgacaaaacaccagaacatcacacttaacgcagcaaataacccggtaagttcgatattaccaggtgccggaaaggggatattcgcaggtttgatatcgcccgcccaccagatagcgacaatcagcgcgacgataagtccggcaataacggtttgtagattagcactggaactggcaccgcgagtaccgatataccacaccagcgccagcgtaccgagttctgccaacaacagttgccagctatgccagccaaacatcgcctggccgaacccggcggcaatttgtagtgcggcaggcaaacccacgggaatgacgcttaaaaacagccagccggtgactcgctcaagccggctaccaaacgccataccgacgaagtgcgcgacgccgcctgcgctgggatagtggcgacccagaatcgcaaacacaatcgcaatcgggaacactaagataatcaaaacgggccacgcccacaggctgttattgcccgctaccagcgcagctaacgcaggaacggcaaacacgccagtgcctaataaactcgtgcttagcaggccaatgccctgggccagccccagttcttgtttgagtccactcatgggttgatgtccgattgcgcccaaattttgggcaactgcgtagattttcgatggtagcacaatcagattcgcttatgacggcgatgaagaaattgcgatgaaatgtgaggtgaatcagggttttcacccgattttgtgctgatcagaattttttttctttttcccccttgaaggggcgaagcctcatccccatttctctggtcaccagccgggaaaccacgtaagctccggcgtcacccataacagatacggactttctcaaaggagagttatcaatgaatattcgtccattgcatgatcgcgtgatcgtcaagcgtaaagaagttgaaactaaatctgctggcggcatcgttctgaccggctctgcagcggctaaatccacccgcggcgaagtgctggctgtcggcaatggccgtatccttgaaaatggcgaagtgaagccgctggatgtgaaagttggcgacatcgttattttcaacgatggctacggtgtgaaatctgagaagatcgacaatgaagaagtgttgatcatgtccgaaagcgacattctggcaattgttgaagcgtaatccgcgcacgacactgaacatacgaatttaaggaataaagataatggcagctaaagacgtaaaattcggtaacgacgctcgtgtgaaaatgctgcgcggcgtaaacgtactggcagatgcagtgaaagttaccctcggtccaaaaggccgtaacgtagttctggataaatctttcggtgcaccgaccatcaccaaagatggtgtttccgttgctcgtgaaatcgaactggaagacaagttcgaaaatatgggtgcgcagatggtgaaagaagttgcctctaaagcaaacgacgctgcaggcgacggtaccaccactgcaaccgtactggctcaggctatcatcactgaaggtctgaaagctgttgctgcgggcatgaacccgatggacctgaaacgtggtatcgacaaagcggttaccgctgcagttgaagaactgaaagcgctgtccgtaccatgctctgactctaaagcgattgctcaggttggtaccatctccgctaactccgacgaaaccgtaggtaaactgatcgctgaagcgatggacaaagtcggtaaagaaggcgttatcaccgttgaagacggtaccggtctgcaggacgaactggacgtggttgaaggtatgcagttcgaccgtggctacctgtctccttacttcatcaacaagccggaaactggcgcagtagaactggaaagcccgttcatcctgctggctgacaagaaaatctccaacatccgcgaaatgctgccggttctggaagctgttgccaaagcaggcaaaccgctgctgatcatcgctgaagatgtagaaggcgaagcgctggcaactctggttgttaacaccatgcgtggcatcgtgaaagtcgctgcggttaaagcaccgggcttcggcgatcgtcgtaaagctatgctgcaggatatcgcaaccctgactggcggtaccgtgatctctgaagagatcggtatggagctggaaaaagcaaccctggaagacctgggtcaggctaaacgtgttgtgatcaacaaagacaccaccactatcatcgatggcgtgggtgaagaagctgcaatccagggccgtgttgctcagatccgtcagcagattgaagaagcaacttctgactacgaccgtgaaaaactgcaggaacgcgtagcgaaactggcaggcggcgttgcagttatcaaagtgggtgctgctaccgaagttgaaatgaaagagaaaaaagcacgcgttgaagatgccctgcacgcgacccgtgctgcggtagaagaaggcgtggttgctggtggtggtgttgcgctgatccgcgtagcgtctaaactggctgacctgcgtggtcagaacgaagaccagaacgtgggtatcaaagttgcactgcgtgcaatggaagctccgctgcgtcagatcgtattgaactgcggcgaagaaccgtctgttgttgctaacaccgttaaaggcggcgacggcaactacggttacaacgcagcaaccgaagaatacggcaacatgatcgacatgggtatcctggatccaaccaaagtaactcgttctgctctgcagtacgcagcttctgtggctggcctgatgatcaccaccgaatgcatggttaccgacctgccgaaaaacgatgcagctgacttaggcgctgctggcggtatgggcggcatgggtggcatgggcggcatgatgtaattgccctgcacctcgcagaaataaacaaacccccgggcagaaatgtctgggggtttttcttttggtcatctttctagtataagattcagacacggacgacgcgagtggcgtccagctcattgattatggggaataacatgcacgtaaaatacttagcagggattgtcggtgccgcgctactgatggcgggttgtagctccagcaacgaattgagtgctgccggtcagagtgtacgcattgtggacgagcagccaggcgcagagtgccagctgattggtactgcgacaggtaagcaaagcaactggctttccgggcaacacggagaagaaggcggttctatgcgcggcgcagcaaacgatctgcgcaaccaggcggctgcaatgggcggtaacgtgatttatggcatcagtagcccgagccagggaatgttgtccagttttgtcccgacggatagccagattatcggtcaggtttataagtgcccgaactgatgtgatccagaggctgggtgacaaacgtataattgcctgatgcgcttcgcttatcaggcctacataaggcattgcaactgattgaatgcttgagaatttgtaggccggataaggcgtttacgccgcatccggcatgaccaacgatcacgttatcagtcatttcaggctggatggctccagcctcgcattagcaaagatgagattatttcgcctgtggtgcagttttgctggtggattgaacacgtaagtgatgcagcgcgcgtaagcattgatcctgggttagcggttgggcgttattcgccgctacggtgcgaacatagacctgacatggcacacccgcgagttttttcagtcgtgggctgaaatcaagcattcggcgagtgatcgcttctatttctttacccggcgttgcttcacgcgttttcaccactgcgccgctaaattgttctttgccactttcatctttaaagcggtaaagcaccgccagataatggtcgaacaagttatgtttccattccggttgggaataggtgtcatattccagattgccattgtcctggcagtcaacgtcgtataacggcaggaaatctaacagactggtaatacgtaatgccagttcacgcatttccgcattattaattgcatgaatgattgctcgcgccagcatttcaatctgcaactcattgacgactaactcacatttgctaccgtcatgtagcgttaatacgaaggtaagattttcgccttgattatcggtaagttccagcgtgttaacccgacgattaatatcggcatttttaagctcatcaaccagaatttctgggatgttttctgccattttcttaatgactttatcgcgagcttgctcatactgaaggtgtgcagcagcatccagtttatgcttttgatgcagacgactttccagcgcaatcagcaggtcgcgcagttccatgacagacataaagaacaagctttctttattgcgaggttctttaattttcagcgccagtgcaatgaaattattactcttgcgaataacaccggtattaacacccttgatgcttatggccatgtaggttctccctaaccatttctcaattaaataattaattttaatttataagccagataaatgggcttggtagtaatagttgttaaaataacataaatagccgtactcactctatataaacagaaaagaaaggttaattattggtgttagctatataaaaagtaacaacagcaatgcatatgaataattaaaggttatgcaacgggcaaagattaaacttcccagtttaatgacaggttgctgtacttgcgtttgttgctcttgccggatgcagcgtaaacgccttatccggcctacagttcattgcaaatccattcaatttcaatgcacgatgtaggcctgataagcgtagcgaatcaggcaattttaatgtttaacttccctgtttaatcagttactgctggcgtagctggagatccagcggcgttttgctgggttcgccgccaatttctcgcgccagtttcggcaccagatatccgctcaccagtgtcagcaactcacgcataatctgccgtgcttcgtcatcactcaccataaaatgcgccgcgccctgtactttatcgagcacatgcaggtaatacggcattacgccggcatcgaacaacgcattactcaggtttgccagcgtttgtgcgttatcgttcacatcacgtaacagaacgctctggttcagcaaagtaacgcctacccggcgcaacttagccatcgcctgacggaatgtttcatctacctcattggcatggttgatgtgattcaccagcaagatttgcagcgtagaacgggcaaagcattcaaccagcgcctcggtgatacgtgccgggatcacaatcggcagacggctgtgaatccgcagacgttttatatgcgggatggcttccagttgtgtgagcaaccagtccagctcgtgatctttcgccatcagcggatcgccgccggagaaaatcatctcgtccagttccggatgcgcagcaacatactcaagtgcagtttgccagttacgcttgttgccctgattttcggcataggggaagtgacgacggaagcaatagcggcaatttaccgcgcagccgcctttgaccagcaaaagcgcccggttgtggtatttatgcaacaaaccaggcactacgctgtgctgttcttccagtgggtcggtggagaatccgggcgcgatgacaaactcatcttggctggtaagtacctgacgcaaaagaggatcgtccggattgcctttctccatgcgatcgataaaactgcggggcacacgcagggcaaaaagctttttggcgctgcgtccggctaacagtttttcctccgcgtctatattcaaaagacgcagaagttcatcaggatcggtcacaacatcggcaagttgcgttaaccaatcttctctggatggggtatttagggttacaatatgcgccattttgtggcttagctaccaattaacaaatttcagagggccttatggcaacgtactatagcaacgattttcgtgctggtcttaaaatcatgttagacggcgaaccttacgcggttgaagcgagtgaattcgtaaaaccgggtaaaggccaggcatttgctcgcgttaaactgcgtcgtctgctgaccggtactcgcgtagaaaaaaccttcaaatctactgattccgctgaaggcgctgatgttgtcgatatgaacctgacttacctgtacaacgacggtgagttctggcacttcatgaacaacgaaactttcgagcagctgtctgctgatgcaaaagcaattggtgacaacgctaaatggctgctggatcaggcagagtgtatcgtaactctgtggaatggtcagccgatctccgttactccgccgaacttcgttgaactggaaatcgttgataccgatccgggcctgaaaggtgataccgcaggtactggtggcaaaccggctaccctgtctactggcgctgtggttaaagttccgctgtttgtacaaatcggcgaagtcatcaaagtggatacccgctctggtgaatacgtctctcgcgtgaagtaatgcggttgtggtgcggcctgcaggctgcaccatcacttattcaggtcagagatgatgaaacgccttatcgttcttgttttgcttgccagcacgctgctcacgggctgtaacaccgctcgcggtttcggcgaagacatcaaacatctcggcaactccatctctcgcgctgccagctaatttttcttctcttccgaaaaatcatcagattcccatcatttttggcgatgttgtctattattaatttgctataggcaaacataaataacattacctaaaaggaagacgttatggtgaagaagacaattgcagcgatcttttctgttctggtgcttagtacagtattaactgcctgcaacaccacgcgtggcgttggtgaagacatttctgatggcggtaacgcgatttctggcgcagcaacgaaagcgcagcaataagcaataacggtacgacagctgtgtcgtgccgtttgttttttctgcgatagtcacaaaggtaatagttgaaattcccctgccacctggcaaaatatccgttcaaccatcagctttgcaggacgacctgcaaacgcctcttttcaccggggacggccccaattctccggagcctgatatgtcctggattatcttagttattgctggtctgctggaagtggtatgggccgttggcctgaaatatacccacggctttagtcgtttgacgccgagtgttattactgtgacggcgatgattgtcagtatggcgctacttgcctgggcgatgaaaagcttaccagtagggacggcttatgccgtgtggacgggtattggcgcagtcggcgcggccataaccggcattgtgctgctcggtgagtccgctaacccgatgcgcctggcgagtctggcgttaatcgtattggggattattggtctgaaactcagcactcattaactaccaggctgctgtacccaaataaatttactgacatcaaacccttcccgggtcgcgactgccagcatctcctgtttcacttcgtcagaaatggttggcgtgcgggagagtatccacaggtagtcgcggtccgggccgcaaaccagcgcatggcggtattcccgatcgagtgcaataacgttataaccgccatagaaaggaccaaagaaactcactttcagcgcagcgcgagttggtgcgccggtaaagtacgctttcccttcactctgctgccacattcctctgtcagggttatagcctttattaatgacattcaggccgccgtcatcacgcaggctgtatgttgcggtgactttttccagtccacgttcaaagcggtgatcaaaacgggcaatctcataccaggtaccgagataacgtttggcgtcgaaattatttactacggtcacgccacgcggcggcgtaggagaactgcaggcaacgaccagaaatgcagctgtcgctgcggcaacgagagggagcaggcgcataaatgtttccttactggtttttttctaagtgtagatgacagcaaggaaaagcggagaaaaggtccgaaaattcggacccgatggaattttactgtagagcgttaagaatctgccaggcggcgtcgactctcgctggattgggatagtttttgtttgccagcatcacgatacccagctctttttctggaataaacgcgacatagctaccaaatccgccggtcgcccctgttttatgtacccaacttgcgcgtactgcaggagttgggggcgtaatcgcttttacggggcgtgctgccagtgcaattttattgtcactgccgttaatgatgctgtcaggatttaccggccagtccagcatttcccagcccaggccctgatacatatcgccggtttgccagtagcgagattgtgccagttgtatcccttgttgaagcgttttctcattgatatcaaggggttttaaattgctttgcacccagcgggccatatcttcaatggtgctcttcacaccataagcttcagcatctaacgccccagggctaacatgcactgccttaccttcgcgatatccccaggcgtaattcttttcttctgcgggcggtacattaatccacgtatggttgagtttgagtggctggaagacacgagtttgcatcgcctgctcaaaactcaaaccagacggcttcacagccagtgcgccgaacaaaccgatactggagttggcatacagacgttgtgttcctggagcccatgcaggctgccagttttgatagaagcgcagcaagtcgctactggatttcacctcatccggcacctgcaatggcaggccgccagcagtgtaggttgcgagatgtaatagtgtgatcccattccactgtttagcggtaagttcaggccagtattttgttgtgggatcgcttaacttgatttcccctcgagcaatagcgtcgccaccaagcacgccagtaaatgttttgctgacgctacctaactcaaacaacgtttgctgtgtgacgggctgctttttggcgatgtccgcatagccccaggtaaagtaataaggtttaccctgataaattaccgccaccgccatacccgggatcttttgttgctctataagcggggtaattgtgcgatgcacaatatcgttgatttgttgaggggcagcaaatgtggagcaagaggcggtaattaataaggcgcagagcgtcgttttgaacatagggtctggtttccatacaaaacggcccgccataggcgggccggatttacattggcgatgcgttagattgtaacgacaccaatcagcgtgacaactgtcaggatagcagccagaccgtagaaaacccatttgcccgcaggtacgtggattttcagatcgtgcatcgcgtggtgcatacggtgtaaaccacaccacagcggcagaacgatcatcaggaacaggaatacgcgaccaatgaagctctgcgcgaacgccagaacgcgctcgtagctcagcgcatcacccggaaacaaccccagtggcagcagaatacccaccagcaggatcatcaccggcgcaatgatggcgctccacataccaccggccccgaagaggccccagaataccggttcgtcagaacgctttggatttggattaatcatctcaggctccttaccagtacagggcaacaaacaggattacgatggtggcaaccacagttaccgcccagagacttttgataattggctctggtcccattttttcgtcttttacaatgatattggccgctttcggtgccagttcaaaccaggttttggtgtgcagcagagctgccgccagagtgatcaggttaatgatcacgataaccgggttttgtaaaaagtcgacgaatcccgcccaggcttccgggccatttttcagggcaaacagcccgaaaatcagttcaatgctgaaccacacagccggaaccgccgtgccttcgcgcagcatgtaaaagcgataaaacggcaattttttccaccaggtggacgtcattggccgtacatacggtttacgtttagtcgtcatgttgcactccttagcgtggtttcagggtcgcgataagaaagtctttgctactttctactttgccctgctgaatggccgcagccggatcgacgtgtttcgggcagacttcggagcagtagcccacgaaagtacagctccatacgccgttctggctgttcaactgcgccatacgctccttcttaccgtggtcgcggctatcttcgttataacgatgcgccagcgtaatggcagccggaccgatgaactctgggttcaggccaaactgcgggcacgcggcgtagcacaaaccacagttgatgcaaccggagaactggtgatacttcgccatctgcgccggggtctggatgttagtaccctgatccgcggtgcgggagttgccgatgatgtacggtttgatcgcttccagactttcgatgaagtgggtcatatcgaccaccagatcgcgttcaatcgggaagttagctaacgcttcaaccttcataccgtcggtgtaatcacgcaggaaggttttacatgccagttttggcacgttgttaaccatcatgccgcaggaaccacaaatcgccatacggcaggaccagcggtagctcaggtccggtgccaggttgtctttgatgtagcccagcgcatccagtaaactggtagttgcgtcataaggcacttcatagaatgcgctatgcggtgcggtatcgacttccgggttatagcgcaccacctcaattttcaggtttttcatctcagccattcgccttctccttcttattggctgcttccgccttatcggctgcatccgcttcgccaccgtaaacgcgtttagctggcggcagcgtagtaatcttcacgtcgctgtactccaggcgagtcgtgccatcagcatcgcggaaggcgagggtgtgtttgaggaagttgacgtcgtcacgctcggtgcaaccttcgtccagacgctggtgcgcgccgcgggactctttacgtgccattgcggagtgcgccatacattcagcaacgttcagaccgtggcccagttcaatggtgtagagcaggtcggtgttgaacacgctggaagtgtcggtgatgcgcacgcgcttgaagcgttcctgcagctctgccagcttgtcgatggttttctgcatcagttccggcgtacggtagataccgcagccttcttccatagccaggcccatttcgtcgcggatcttcgcccagttttcgccgccatcctggttaaccagatctttcagacgttgttcaacgccagctgcctgcgcttcaattgccgcttcgttgccattaccggcagttgctgcacgctctgtcgcttgttcaccggccagacggccgaagaccaccagttccgccagggagttagaacccagacggtttgcaccgtgcagaccaacagaggaacattcacccacggcgaacagacctttaatgcgggtttcacagttctgatcggtttcgataccgcccatggtgtagtgtgcggtcggacgtaccggaatcggttctttaaccggatcgacgccaacgtacgctttcgccagttcgcagatgaacggcagacgttcatgcagttttttctcgccgaggtgacgcaagtcgagataaaccacatcgccacgcggcgtggagatggtgttgcctttacgccattcgtgccagaaggcctgagagactttgtcgcgtggacccagttccatatatttgtttttcggctcgcccagcggagtttccgggcccatgccgtaatcttgcagataacggtagccatttttgttgaccagaataccgccttcaccgcggcaaccttcggtcatcaggataccggaacctggcagaccggttgggtgatactgaacgaattccatgtcacgcagcggaacgccgtggcttagcgccatacccataccgtcaccggtaacgatgccgccgttggtgttgtaacgataaacgcgacccgcaccgccagtagccataacgaccgcgttagcacggatctgcaccagcgtgccttccatcatgttcattgctaccaggccgcgaacatgaccatcatcaaccagaatatccagcacgaaatgttcgtcaaaacgctggatctgcgggaattgcagagaggtctggaacagcgtgtgcagcatatggaagccggtcttatcggcggcgaaccaggtgcgctcgattttcatgccgccgaagcgacgtacgttgacgctaccatccgggcgacggctccatgggcatccccacagttccagttgggtcatttcggttgggcagtggtggacgaaataatccacgacatcctgctcacacaaccagtcgccacccgctactgtatcgtgaaagtgatattcgaagctgtcatgatcctgcgcgacagcggcggagcccccttctgcagcaacggtatggctacgcatcgggtatactttactgattagtgcgatttttgcattcggatttgcctgcgcggcagcaattgcagcacgtaatcccgcgccaccggcgcctacaatggcaagatcggcttgaaaggtttgcacgacattcctccagattgtttttatcccacagccacgtacttcagggtaagtacctgaaagttacggtctgcgaacgctattccactgctcctttataggtacaacagtatagtctgatggataagtctgaaatttgacgagatcgatttttttagtgcgcaagagggctaaattatcactgaagatgattaatttaattactaaaccatcagatcgtgctttttttagtcactgcccaccgctgtttgattcctgcgtaaaatttgtctcgccgtcgcgttgcgagtagacttcgtgcccttgtcaaaaactggagatttaactatgagcgaaacggcatcctggcagccgagcgcatccattcctaacttattaaaacgcgcggcgattatggcggagatccgtcgtttctttgccgatcgtggagtgctggaggtggagacgccttgtatgagccaggcgacggtaaccgatattcatttggtcccgtttgagacacgtttcgttggccccgggcatagccaggggatgaatctctggttaatgaccagcccggaataccatatgaaacgcctgctggttgccggttgtgggccggtattccagctgtgccgcagcttccgtaatgaagagatggggcgttatcacaaccctgagttcactatgctggagtggtatcgaccgcactatgatatgtaccggttgatgaacgaggtggacgatctcttacaacaggtgctggactgcccggcagcagaaagcctttcttatcaacaagctttcttgcgttatctggaaattgacccgctctctgccgacaaaacgcaactgcgggaagtcgcagcgaaactggatttgagcaatgttgctgataccgaagaagaccgcgacacgctgctacaattgctgtttacctttggcgtagagccaaatattggcaaagaaaaaccgacctttgtgtaccactttccagccagccaggcaagtctggcgcaaatcagtaccgaagatcatcgggtcgctgaacgctttgaggtttattataaaggtattgagctggcgaatggtttccatgaattgacggatgcccgtgagcagcaacaacgctttgaacaagataaccgtaagcgcgcggcgcgcggtttgccgcagcaccccattgaccagaatctgattgaagccttgaaagtcggtatgcctgactgttccggcgtggcattaggtgttgatcgtctggtgatgttggcgctgggcgcggagacactggctgaagtcatcgcctttagcgttgaccgggcataattctgaaaaattactgaattaacagcgaagaatggcgtgataagcgccattctgtagcatatgttttcatttttccgttaaaggccacaatttaagactggatatttgatatcatccaggtatcaattctgtattggtttttacgctgcctgctcaatgttgcgcagtgcagttcagtgggcacgtgttatacacgcgctgaaatgaaggatggtttcatgcctcacacgataaaaaagatgagtctgataggactcatattgatgatctttacttccgtatttggatttgccaatagcccaagcgcttattacttaatgggttatagtgcgattcccttttatatattttctgcattgttattctttattccattcgccttaatgatggctgaaatgggagctgcttatcgcaaagaagaaggcggtatctattcctggatgaataatagtgtcggaccacgttttgccttcattggtacgtttatgtggttttcctcttatatcatctggatggtgagtacctccgcgaaagtttgggtaccgttcagtacattcctctatggtagcgacatgacccagcactggcgtattgccggactggagcctacgcaggtggttggtctgctggctgtggcatggatgattctggtcaccgtcgttgcttctaaggggattaataaaattgcccgcattactgcggtgggcggtattgcagtaatgtgtctgaatttagtattgctgttagtaagcattactattttgttattaaatggtgggcatttcgcgcaggatattaatttccttgcaagtccgaacccgggttatcagtccggtctggcaatgctaagctttgtggtatttgccatttttgcctatggcggaattgaagcggttggtggtctggtcgataaaacggaaaatccagaaaagaactttgccaaaggtattgtttttgccgctattgttattagtatcggttatagcctggcaatatttttatggggcgtcagcacaaactggcagcaggtattaagtaatggttccgttaacctcggcaatattacctatgtgctgatgaagagccttgggatgacgctgggtaatgcactgcatttgagtcctgaagcgagtttgagcctgggcgtatggtttgcgcgtattactggacttagcatgttcctcgcctataccggtgcgttctttacgctttgctatagtccgttgaaagccatcatccaggggacgccgaaagcattgtggccggaaccgatgacgcgcctgaatgcgatggggatgccgtctatcgccatgtggatgcagtgcgggttggttactgtcttcatcctgctggttagctttggtggcggtaccgcaagcgcgttctttaacaagctgacgctgatggcgaacgtgtctatgacgcttccttacctgttcctcgcgctggctttcccgttctttaaagcacgtcaggatctcgacagaccgtttgtgattttcaaaacgcatttgagcgcaatgattgcgacagtggttgtcgtactggtggtgacatttgcgaacgtcttcaccatcattcaacctgtggttgaagccggagactgggacagcacattgtggatgattggcggccctgtcttcttcagcctgttagcgatggcgatttaccagaactattgcagcagagtggcaaaaaatccgcagtgggcggtggaataacccgatgccctatcgtctacctgacgatagggcgtaaagacaggaaatgttatggatgacaccagccgggacccggcaataaccgaagatgaaatcagggcgctgcaattttctgccggggatgtagcggaaatagagcagacgattctctcttttgtcgatgcctgccacacccgtaaagtggcgatggtggtgggtagcaccattaacaccctcaaagatcgcgatggtaaacggtggggaaacctgccggatatttattgcgcttatcttatccgatgtctggtttttcgcggggaattagtgggatacggcgatttgtttcgtatgcgctatagcgaaattaagcgaccggttaccttatgagtgcgcgcatgtttgtcttatgctgcatctggtttattgtggcgttcctctggataaccatcacttccgcgctggacaaagagtggatgattgatggacgcgggattaacaacgtctgcgatgtgttgatgtatctcgaagaagacgatacccgtgatgttggtgtgataatgacgttaccgctctttttcccttttctctggttcgctttgtggcgaaaaaaacgcggctggtttatgtacgccaccgcgctggctattttcggctactggctgtggcagttttttctgcgctatcagttttgtttgtgagccggattggttcatccggcacacaaacttacaaacttcccgcctgacgacctttgcccgcagacgtcagcgttctccccgtttgtttaccgttgaggctttccagacgcatctggaagggcgggaatggcatatcgataccgtgggcatggaagccagccagaatcagctggtggatctcatggcgtagcggcatacggtgacccatctcagcggcgtaaatacgcagctcgaaaatctgaatcccctgttgcagatccaccaggaagacttccggtgccgggttgtcgatcaccaggctgcagcgacgcgctgcggtgagcaggatttccgtcacttcttcgctattggcatcggcaggggccggtatcgtcaacaccacgcgcgtgacgctgtcagagaggctccagttgataaactgctcggtaataaacgccttgttcggcacgattatctctttacggtcccagtcgctgatggtggtggcgcgggtgttaattttcgtcacgctaccggtgagatcgcgaattgtcaccgtatcgccaatgcgaatcggtttttcgaacaggataatcagaccagagataaagttggcgaaaatttcctgcaaaccaaaaccgagaccaacaccgagcgcggcaaccagccactgcaatttgctccactcaataccaatcatactgaagccgaccagcccgccaatcagcatcagcagatatttggtgatggtggtgatggcgtaacccgtacccggcgttaaatccaggtgctgcaaaatcgccagttccagcagcgcgggcaagttgcgcaccagctgcgtggtgatgataaacaccagaatggcaatcagcaccgcaccgagggtaattggctccagactttctacgccctgtaccgtggaggtgacatcccacaggctaatattttcgaggaagccgaaagcggaatggatttcactccacagcacaatgacagaaagcagggcgatcaacatcaaaatactgcgcaccagccgcaaggattgcgcactgatggcatcgagatcgacttcgctttcatcgacttcaattgctccttccgggctactgtgatgatgcgcttcctcttcgccacgcgcacgttgcgctaacatctctgcccggcgatgcttcgcccgatcaaacgccagcctgcggcgctggatcagcatccagcggcggataacgtgataaaccaccagtagcaggaaccagatggcaacgctggtttcaagcctcgctaacagcgcctgtgccgttgccagataacccaccgcgctcgccagaatggcaaccaacggcgcgccaatcatcatgttccacagcatatggttggtaatgttgtcgccgctgccctctttgttgagatacagcggaatcccggcctttttcaggctgagggtgaccaccgccagcgcaccgcaaatgaggataaagcaaagccgtcccaggctaccggagaattcacggtcgtcgaggttatcgaacatcatcagcgccataatcagcggcacaataagcccgatgctcatcaggtagtagcgcatcccacgggaaacacgttcgcgcggccagccaaaatgagcgataaacaagccgttcgggcgggcaaaggtggcgcaaatcatcactacccacagcagcggcacggtggccgttacaccatcgccaatcgcgaccgccagcggataaggccacgcctcgcgcaagccgtaacccagcgtcatccacagcaccggtaacggactcgcgacgagaatgctccagaaaagagtgcgcaacgtcagccagaagtgatcctgagtcactttgccaactttcgccgcgctacgttcaagaaaacgggtgaaatagcggcggctgtaaatactgcaaccgaccagaatcaacgcgccaaacagcggcaaaattgtctctttgctggtcagcatcatcacactggctttgcccaactgactgaaggtgtccaggctaatgagacgacgcagatcctgggcgatttccagcggccaggcgatggtcatcgggcgcacgtcagaggtccagaacagatagcggtgcgttgcttcgttcacctctttcagcgcatcctccagttgcccgttggagactttcagcttggtcagttccaatagtagcgtgtcgccaccctgcaacaaactgttcagcaactcacgctgagtgcgcagttgtgcttccagaatacggttttgctcggcagtcagcggctgaccgtcggcctgatgaatttgccgtagcagcggctgtttattaagcagatcctcataacgtaaccgttgcacacgcaactgcgccatttcggtatcaagctgttgtggtttcggcatttccggcagccgtgccacctgcgcccgcagcgcttcgccgagcagattggagcttcccagccattggctctgttcacgcagcgtattcaacgcctgccggacctgtaacgtctggctggcagcctgacgctgttggctggcaacgagatccatccgctgcgcctgttgattcaaagccgcgcttagttcgcggttaattttgaattgcgcgacgatatctttcggcaaatcggcgctgttttctgccagcaattcggtactttccagcgcccgctccgcctcaagctgacgttggctgtttaattgattacgcaaggcctgcaaatacgcatccagttgctggctctctttttccgccagctcactgcgtaagcgcgctaattcctggcggttattggcagacagctgcgccagctccagttcatcaacgagcgccttaagacgtgcagagtcagactgcaacgcgaaattttgtgcctgattgagcggagtattgccggtaagcgttcccaggcggcgctcgatctcatttaactgacggcgggcgtcggtttgctgttgcggcagttgattcaggctatcggcaatctcgcgggcgcgctcctgctcttgctgggcctgacggcttttatccagcaactggctgctgacctggagaatttcctgattcagcgcgtcggtagacattcccgggctcacgctgcgcggctcgtcacgcatgttgtttaattgtgcgcgcagagtagcggagagtttcggataattatcgataacttgctgatattgtttgatgcgctcaagggaaccttttcgttcctcaagcgcatttaaggcagactggagcgcctctacgacttccggctgtgcgggtttcgccgcttttgcctgctccagttcctgagtgatttgtttgctatcgggggccgtcgcggcgtacgccccccaactgaggcaccaggccatcagaaaagtgataatcaggcgcacgtcagcgtttcctttgatggattagacctggtcttttttgtcgtcaaccaatgggctggcgtcgtgttctgcttcgatctcttcagcaggaagcggggcaggttcagcgtctggcgtaacaaaggtttcggtagatactgccagcggctggccaattttcgtgacagacaggctttccagttgctcaaccagattcactttacccggtgcaaacaggttgataacggtggaaccgagtttaaagcgacccatttcctggcctttcagcagtgccacagaaccgtcgttttccccggcaggccaggtccagcgcttgatgataccttcgcgcggcggcgtaatggtgcccgcccagaccgtctcaatgctgccaacaatcgtcgctccgaccagaatctgcgccattgggccaaattcggtatcgaaaaggcaaatcacgcgttcgttacgggcaaacagattcggcacgttctgagccgtgagatggttaacggagaagagatcgcccggcacgtagatcatctcacgcagaataccgttgcacggcatgtgtacgcggtggtagtcacgcggggagaggtaagtggtcacaaacgtaccgttgcggaacaggtccgccatcagatagttgcctgccagcagggcttcgaggctgtagttgtggcctttggcttgcaggattttatcttcttcgattttacccaactggctgataacgccatcggcaggcatgaccagtacattcggatcggtatcgattgggcgtacttcgtcacgcagcggacggacaaagaattcgttaaaggtgcggtagctggcggtgtccggcttttgcgcctctttcatgtcgaccttgtagtatttaacgaacagatcgataaccagttttgtcagccatcctgcccgcttgcttgcgccccaacccgccaggcgagtaagccatagtttcggcagaatgtactgtaggctaagtttaaaactatttaacaaggtagcctccaggccattgttttgtcgttcctgatccggcctacatgccggatcctgaaaaaaaggggacgattctaacgacggttagcttaattgtcagtcatccgtatcagaaaagtttttacgcgtttttacctgcgccatgctttccagaatacggtgatagttttcgaaacgggtttccgcgattttcccttcctcaaccgcttcccggatagcgcagcccggatcggtatcgtgtttgcaatcgcgatatttacacagacctaaatagtcatggaattcgacaaagccctgagtgatttgttccggctccaggtgccagaggccgaactcacgcactcctggggagtcaatcacatcaccgccgtgcgggaagtgatacagccgagcggcggtcgtggtgtgctgaccgagcccgctgttgtcagagatatcgttggtcaggatctctttttgcagccccagcaacgcattcagcaggctggatttgccgacgccagactgcccggcaaaaatgctgatgcgcccggtcaacgcctcttccagcggttttagcccatcctgagtatggctggaaaccatcaatacgcgataaccgatattgcggtagatatccatctgctcgttgacgaacgccatgccttcgtcgtccagcaggtctatcttgttgagcacaataatcggctcaatctgcaaggtttcgcaggccaccaggtaacggtcgataatattgaggctcagctccggcaaaatggcggagacaatgacaatctggtcgatgttggcggcaataggttttacgccgtcgtagaaatccggacgcgtcaacacgctggtacgctcatgcaccgcttccacgatccctttgacatttacgccttccgccgccggtttacccggacgccagactacgcggtcgccggttaccaggctacggatggtacggcgaatattgcagcggtgaacgtcgccatcggcggattccacatcagcgtgcataccaaagcggctgatgacgataccttcatcaggctcgccaaacagattgtcgtcgtagtcgggcttctccttagacgttttaagacgacgctggtgattggcgttcacgcggcgctgctggcctttggagagtttatttttactcaatcgtacagactcctggtcgcccctgatgggcaaaacatctatgatacacgcaattgtggatcaatatagtcactgtgaatgggtggaaaatagcatgagtgccaatgaaaacaacctgatttggatcgatcttgagatgaccggtctggatcccgagcgcgatcgcattattgagattgccacgctggtgaccgatgccaacctgaatattctggcagaagggccgaccattgcagtacaccagtctgatgaacagctggcgctgatggatgactggaacgtgcgcacccataccgccagcgggctggtagagcgcgtgaaagcgagcacgatgggcgatcgggaagctgaactggcaacgctcgaatttttaaaacagtgggtgcctgcgggaaaaagcccgatttgcggtaacagcatcggtcaggaccgtcgtttcctgtttaaatacatgccggagctggaagcctacttccactaccgttatctcgatgtcagcaccctgaaagagctggcgcgccgctggaagccggaaattctggatggttttaccaagcaggggacgcatcaggcgatggatgatatccgtgaaagcgtggcggagctggcttactaccgcgagcattttatcaagctgtaaaatttttcctggtcacgtaagcgccggaatccacttgcggcggcgtgattttgacgctaaattgaacgtcttgctgataatttcagcacttgagataaaaacgcaaaaaaaacttttttggggggttgcagagggaaagatttctcgtataatgcgcctcccgtaacgacgcagaaatgcgaaaattacgaaagcaaaattaagtagtacgcgggaatagctcagttggtagagcacgaccttgccaaggtcggggtcgcgagttcgagtctcgtttcccgctccaaaatttgaaaagtgctgcaaagcacagaccacccaagcgggaatagctcagttggtagagcacgaccttgccaaggtcggggtcgcgagttcgagtctcgtttcccgctccaaaatttgaaagtgctgtaaggcacagaccacccaagcgggaatagctcagttggtagagcacgaccttgccaaggtcggggtcgcgagttcgagtctcgtttcccgctccaaattcttctctcaataaaatatccacagcgacgcgatgcgttattgctggtttttgttgtctctgacaaactcttgtaaacagagttatccacagcctcaggctgtaatcttaatttcaaagaaacttcgcacggtgaatagtatttttttaacctattgatagataagttaaaaattaagattccgttttgtcgagtcgatcacttgacgattttattcgtcttgaattgcaatgcgtttttatttttattcacaagctgtggatgaatcaggcgtcacgcggtaaccctttttcaatcacccgaaccagacgctgttttttcggcaattgcacttcgactatgcacgcatttcgtctctctatttgctgcgcaatcgcccacgctatgtgctcatcgagaagtgggtgctcacctttacgactttccagcgctgtcaaaatcgtttcatcccaaggggcattgcctaatgctacggcgatattacgcagccaacgcaggtgaccaatacgacgaatcgcgcttccttccgtgacttttaaaaacttctcttcgctccaggcgaataactcaatgagttccggtgcgtgtagcggcttacgcgggctgaaatcctcttctgtggtgagttgactatagcgattccacgggcagataagctggcagtcatcgcaaccgtaaatacggtttcccattaacggtcgcaactcttccgggatcgccccttcaagttcgatggtgagataagagatacagcggcgagcatcgacggtatatggctcgacgatggcaccggtcgggcaaatcgtcatacaggccacgcatttgccgcatccttcctcgactggttgatccacgggcagcggaatatcgaccagcaattcgcctaaaaagaagaagctaccggcctcgcgattgaggataagactgtgcttacctgtccagccgagcccagctttttcagctaacgggcgctcgagaataggcgcagaatcgacaaacggtctaaaattcaggctaacacaatgttgctgaatcatctcgcccagctttttgagtcggttgcgcagaagtttgtgatagtcacggcccagcgcataacggctaacatagccgagtttggggtttttcagcgtgctggcaaatgcggcgttagcaggaaggtaattcatccgcacgctgatcacgcgcagcgtaccgggcaataactcatgagggcgagcgcgcagcataccgtgacgtgccatccagtccatttcgccgtggtattgtttgtccagccatgcttgcagtttgggctcggactcgctgagatcggtatcggtaatacctacctgctgaaagcccagttccagcccccactgtttaattttttgcgctaactgattgagatcgaggggctcactcatgacggaccatacaatgaagaaaaaccccgtaagtataccacacaccgtctggtacgccgacgatatccgccgcggagaacgcgaggcggcagatgtgctggggctcacactctatgagctgatgcttcgcgctggcgaggccgcattccaggtgtgtcgtagcgcgtatcctgacgcccgccactggctggtgctgtgcggtcatggtaataacggcggcgatggctacgtggtcgcgcgactggccaaagcggtcggcattgaggtcacgttgttggcccaggagagcgacaaaccgttgccggaagaggccgcgctggcacgcgaagcatggttaaacgcgggtggcgagatccatgctagcaatattgtctggcccgaaagcgtagatctgattgttgatgcgctgctcggtaccggtttgcggcaagcgccccgcgaatccattagccagttaatcgaccacgctaattcccatcctgcgccgattgtggcggttgatatcccttccggcctgctggctgaaactggcgctacgccaggcgcggtgatcaacgccgatcacaccatcacttttattgcgctgaaaccaggcttgctcactggaaaagcgcgggatgttaccggacaactgcattttgacagtctggggctggatagttggctggcaggtcaggagacgaaaattcagcggtttagtgcagaacaactttctcactggctaaaaccgcgtcgcccgactagccataaaggcgatcacgggcggctggtaattatcggtggcgatcacggcacggcgggggctattcgtatgacgggggaagcggcgctgcgtgctggtgctggtttagtccgagtactgacccgcagtgaaaacattgcgccgctgctgactgcacgaccggaattgatggtgcatgaactgacgatggactctcttaccgaaagcctggaatgggccgatgtggtggtgattggtcccggtctgggccagcaagagtgggggaaaaaagcactgcaaaaagttgagaattttcgcaaaccgatgttgtgggatgccgatgcattgaacctgctggcaatcaatcccgataagcgtcacaatcgcgtgatcacgccgcatcctggcgaggccgcacggttgttaggctgttccgtcgctgaaattgaaagtgaccgcttacattgcgccaaacgtctggtacaacgttatggcggcgtagcggtgctgaaaggtgccggaaccgtggtcgccgcccatcctgacgctttaggcattattgatgccggaaatgcaggcatggcgagcggcggcatgggcgatgtgctctctggtattattggcgcattgcttgggcaaaaactgagcccgtatgatgcagcctgtgcaggctgtgtcgcgcacggtgcggcagctgacgtactggcggcgcgttttggaacgcgcgggatgctggcaaccgatctcttttccacgctacagcgtattgttaacccggaagtgactgataaaaaccatgatgaaagcagtaattccgctccctgaataaggaagtgactgataaaaaccatgatgaatcgagtaattccgctccctgatgagcaggcaacattagacctgggcgagcgggtagcgaaagcctgcgatggcgcaaccgtaatctatctgtatggcgatttaggcgcaggtaaaaccacctttagccggggctttttacaggctctgggtcatcagggtaatgtcaaaagccccacttatacgctggtcgaaccctatacgctcgacaacttaatggtctatcactttgatttgtaccgccttgccgatcccgaggagctggagtttatggggatccgcgattattttgccaacgatgccatctgcctggtggagtggccacaacaaggtacaggtgttcttcctgacccggatgtcgaaatacacattgattatcaggcacaaggccgtgaggcgcgcgtgagtgcggtttcctctgcgggtgaattgttgctggcgcgtttagccggttaacctttgaaaggtggcgggatgatgtatcgcatcagaaattggttggtagcgacgctgctgctgctgtgcacgccggtgggtgccgcgacgctctctgatattcaggtttctaacggtaatcaacaggcgcggataacgttgagttttattggcgatcctgattatgcgtttagccatcaaagcaaacgcaccgtggcgctcgatatcaaacaaacgggcgtgattcagggactgccgttgttgttcagcggcaataatctggtgaaggcgattcgctctggaacgcctaaagatgcacaaacgctacggctggtggtcgatcttaccgaaaacggtaaaaccgaagcggtgaagcggcagaatggcagcaattacactgtcgtctttacgattaacgccgatgtgccgccaccgcctcctccgccgcccgtggttgcgaaacgcgttgaaacgcctgcggttgtcgcaccgcgcgtcagcgaaccggcgcgcaatccgtttaaaacggaaagtaaccgcactacgggtgttatcagcagtaatacggtaacgcgtccggcagcgcgcgcgacggctaacactggcgataaaattatcatcgctattgatgccggacacggcggtcaggaccctggcgctatcggccccggtggtacgcgggagaaaaatgtcaccatcgccatcgcgcgtaaattgcgtactttgctcaatgacgatccgatgtttaaaggcgttttaacccgtgacggggattactttatcagcgtgatggggcgcagtgatgtggcacgtaagcaaaacgccaatttcctcgtgagcattcacgctgatgccgcaccgaaccgcagtgcgactggcgcttccgtatgggtgctctctaaccgtcgcgccaacagtgaaatggccagctggctggagcagcacgagaaacagagcgagctgctgggtggggcgggtgatgtgctggcgaacagtcagtctgacccctatttaagccaggcggtgctggatttacagttcggtcattcccagcgggtagggtatgatgtagcgaccagtatgatcagtcagttgcaacgcattggcgaaatacataaacgtcgaccagaacacgccagccttggcgttctgcgcagcccggatatcccaagtgtactggtcgaaaccggttttatcagcaacaacagcgaagaacgtttgctggcgagcgacgattaccaacaacagctggcagaagccatttacaaaggcctgcgcaattacttccttgcgcatccgatgcaatctgcgccgcagggtgcaacggcacaaactgccagtacggtgacgacgccagatcgcacgctgccaaactaaggacgattgatgccaattcaggtcttaccgccacaactggcgaaccagattgccgcaggtgaggtggtcgagcgacctgcgagcgtagtcaaagaactagtggaaaacagcctcgatgcaggtgcgacgcgtatcgatattgatatcgaacgcggtggggcgaaacttatccgcattcgtgataacggctgcggtatcaaaaaagatgagctggcgctggcgctggctcgtcatgccaccagtaaaatcgcctctctggacgatctcgaagccattatcagcctgggctttcgcggtgaggcgctggcgagtatcagtagcgtttcccgcctgacgctcactagtcgcaccgcagaacagcaggaagcctggcaggcctatgccgaagggcgcgatatgaacgtgacggtaaaaccggcggcgcatcctgtggggacgacgctggaggtgctggatctgttctacaacaccccggcgcggcgcaaattcctgcgcaccgagaaaaccgaatttaaccacattgatgagatcatccgccgcattgcgctggcgcgtttcgacgtcacgatcaacctgagccataacggtaaaattgtgcgtcagtaccgcgcagtgccggaaggcgggcaaaaagaacggcgcttaggcgcgatttgcggcaccgcttttcttgaacaagcgctggcgattgaatggcaacacggcgatctcacgctacgcggctgggtggccgatccaaatcacaccacgcccgcactggcagaaattcagtattgctacgtgaacggtcgcatgatgcgcgatcgcctgatcaatcacgcgatccgccaggcctgcgaagacaaactgggggccgatcagcaaccggcatttgtgttgtatctggagatcgacccacatcaggtggacgtcaacgtgcaccccgccaaacacgaagtgcgtttccatcagagccgtctggtgcatgattttatctatcagggcgtgctgagcgtgctacaacagcaactggaaacgccgctaccgctggacgatgaaccccaacctgcaccgcgttccattccggaaaaccgcgtggcggcggggcgcaatcactttgcagaaccggcagctcgtgagccggtagctccgcgctacactcctgcgccagcaagtggcagtcgtccggctgccccctggccgaatgcgcagccaggctaccagaaacagcaaggtgaagtgtatcgccagcttttgcaaacgcccgcgccgatgcaaaaattaaaagcgccggaaccgcaggaacctgcacttgcggcgaacagtcagagttttggtcgggtactgactatcgtccattccgactgtgcgttgctggagcgcgacggcaacattagtcttttatccttgccagtggcagaacgttggctgcgtcaggcacaattgacgccgggtgaagcgcccgtttgcgcccagccgctgctgattccgttgcggctaaaagtttctgccgaagaaaaaagcgcattagaaaaagcgcagtctgccctggcggaattgggtattgatttccagagtgatgcacagcatgtgaccatcagggcagtgcctttacccttacgccaacaaaatttacaaatcttgattcctgaactgataggctacctggcgaagcagtccgtattcgaacctggcaatattgcgcagtggattgcacgaaatctgatgagcgaacatgcgcagtggagtatggcacaggccataaccctgctggcggacgtggaacggttatgtccgcaacttgtgaaaacgccgccgggtggtctgttacaatctgttgatttacatccggcgataaaagccctgaaagatgagtgatatcagtaaggcgagcctgcctaaggcgatttttttgatggggccgacggcctccggtaaaacggcgttagccattgagctgcgtaaaattttaccagtagagttgataagcgttgattctgcccttatttacaaagggatggatatcgggacggcgaagccgaacgctgaagagttactcgccgcgccgcaccgattgctggatattcgcgatccgagccaggcttacagcgctgctgattttcgccgcgatgcgctggcggaaatggccgatatcaccgcggcggggcggatcccactgttagtgggcggtacgatgttgtatttcaaggcattgctggaagggttgagcccgctaccgagcgcagacccggaagtacgggccagaattgagcaacaggcggcagagcaaggttgggagagtttgcatcgtcaacttcaggaggtagatccggttgcggcagcaaggattcatccaaatgatccacaaaggctttcccgggcactggaagtttttttcattagcggtaaaactttaacggaactgacgcaaacgagtggagacgctctaccgtatcaggtgcatcagttcgccatcgccccggcgagccgtgaactgctccatcaacgcattgagcagcgttttcatcagatgttggctagtggttttgaagcagaagtccgggcgctttttgcccgaggagatttgcatacggacttgccttccattcgttgcgtgggttatcgccagatgtggtcttaccttgaaggcgaaatcagttacgatgaaatggtttatcgaggtgtttgcgccacgagacagttggcgaagcggcagataacctggctgcgtggttgggaaggggttcactggcttgacagtgaaaaaccagaacaggcgcgtgacgaagtattacaggttgttggtgctatcgcaggctgaatgtgtacaattgagacgtatcgtgcgcaattttttcagaatcgaaaggttcaaagtacaaataagcatataaggaaaagagagaatggctaaggggcaatctttacaagatccgttcctgaacgcactgcgtcgggaacgtgttccagtttctatttatttggtgaatggtattaagctgcaagggcaaatcgagtcttttgatcagttcgtgatcctgttgaaaaacacggtcagccagatggtttacaagcacgcgatttctactgttgtcccgtctcgcccggtttctcatcacagtaacaacgccggtggcggtaccagcagtaactaccatcatggtagcagcgcgcagaatacttccgcgcaacaggacagcgaagaaaccgaataaggtttcgggctgtttttttacacggggagccagcgatcctgcgttccccgctgatctatttagagggttatacgcttgtttgaccgttatgatgctggtgagcaggcggtactggtacacatctattttacgcaagacaaagatatggaagacctccaggagtttgaatctctggtctcttccgccggtgtcgaagcattgcaggtgattaccggtagccgtaaagcgccgcacccaaagtattttgtaggtgaaggtaaagcagttgaaattgcggaagctgtcaaagcgacgggtgctagcgtcgttctttttgaccatgccctgagcccggcgcaagagcgtaacctggagcgtttgtgcgagtgtcgtgttatcgaccgcaccggccttattttagatattttcgcccaacgtgcgcgtacccatgagggtaagttgcaggttgagctggcgcagctgcgccatctggctacgcgcctggtgcgtggctggacccaccttgaaagacagaaaggcgggataggtttgcgtggtccgggtgaaacccagctcgaaaccgaccgtcgtttgttgcgtaatcgcatcgtgcagatacagagccgcctggaaagagttgaaaagcagcgtgagcaggggcggcaaagccgtatcaaagccgacgttcctactgttagcctggtgggatataccaacgccggtaaatctacccttttcaatcgcatcaccgaagcgcgggtctacgcggcagaccagttgtttgccaccctcgacccgacgttgcggcgtattgacgttgcagatgtcggtgaaaccgtacttgcagataccgtagggtttattcgccacctgccgcacgatctggtggcggcatttaaagccacgttacaagagacgcggcaagccacattactgctgcacgtcattgatgcggcggatgtgcgtgtacaagaaaacatcgaagcggtgaatacggttcttgaagagatcgacgctcacgagatcccaaccctgctggtgatgaacaagatcgatatgctggaagatttcgaaccgcgtattgatcgggacgaagagaacaaaccgaaccgtgtctggctttccgcacagaccggagcggggataccacagctttttcaggctttgacggagcggctttccggcgaggtggcgcagcatacattgcgtctgccaccgcaggaagggcgtctgagaagtcgtttttatcagcttcaggcaatagaaaaagagtggatggaggaggacggcagcgtaagtctgcaagttcgtatgccgatcgttgactggcgtcgcctctgtaaacaagaaccggcgttgatcgattacctgatctaacggcgtagcgtctgaagcgtggagtcatatcctctggcgtcgaaagacaacagggatcaccgcataacaaatatggagcacaaacatggcgtggaatcagcccggtaataacggacaagaccgcgacccgtggggaagcagcaaacctggcggcaactctgagggaaatggaaacaaaggcggtcgcgatcaagggccacctgatttagatgatatcttccgcaaactgagcaaaaagctcggtggtctgggcggcggtaaaggcaccggatctggcggtggcagtagtagccaaggcccgcgcccgcagcttggcggtcgtgtcgttaccatcgcagcggcagcgattgtcattatctgggcggccagtggtttctataccattaaagaagccgaacgcggcgtggtaacacgctttggtaaattcagccatctggttgagccgggtctgaactggaaaccgacgtttatcgacgaagtcaaaccggtgaacgtggaagccgtgcgtgaactggccgcttctggtgtgatgctgacgagcgacgagaacgtagtgcgcgttgagatgaacgtgcagtaccgcgtcaccaatccggaaaaatatctgtatagcgtgaccagcccggatgacagcctgcgtcaggctaccgacagcgccctgcgtggagttatcggtaaatacaccatggaccgcattctgacggaaggtcgtaccgtgattcgtagcgatactcagcgcgaactggaagagacgattcgtccgtatgacatgggtatcacgctgctggacgtcaacttccaggctgctcgtccgccggaagaagtaaaagcggcgtttgacgatgcgattgccgcgcgtgaaaacgaacagcaatacattcgtgaagcagaagcgtataccaacgaagttcagccgcgtgcgaacggtcaggcgcaacgtatcctcgaagaggcgcgtgcgtacaaggcccagaccatcctggaagctcagggtgaagtggcgcgctttgctaaacttctgccggaatataaagccgcgccggaaattactcgcgagcgtctgtatatcgagacgatggaaaaagtgttgggtaacacccgcaaagtgctggttaacgataaaggtggcaacctgatggttctgccgttagaccagatgctgaaaggtggtaacgcccctgcggcgaagagcgataacggtgccagcaatctgctgcgtctgccgccagcctcttcctccacaaccagtggagcaagcaacacgagctccaccagtcagggcgatattatggaccaacgccgcgccaacgcgcagcgtaacgactaccagcgtcagggggaataacgatgcgtaagagtgttatcgcgattatcatcatcgtgctggtagtgctttacatgtctgtctttgtcgtcaaagaaggtgagcgcggtattacgctgcgttttggtaaggtactgcgtgacgatgacaacaaacctctggtttatgagccgggtctgcatttcaagataccgttcattgaaacggtgaaaatgctcgacgcacgtattcagaccatggacaaccaggccgaccgctttgtgaccaaagagaagaaagacctgatcgtcgactcttacatcaaatggcgcatcagcgatttcagccgttactacctggcaacgggtggtggcgacattagccaagcggaagtgctgttgaaacgtaagttctctgaccgtctgcgttctgaaattggtcgcctggacgtgaaagatatcgtcaccgattcccgtggtcgtctgaccctcgaagtacgtgacgcgctgaactccggttctgcgggtacagaagatgaagttactaccccggcggcagataacgccattgccgaagcggcagagcgcgtaacggctgagacgaagggcaaagttccggtcatcaacccgaacagtatggcggcgctgggtattgaagttgtcgatgtgcgtatcaagcagatcaacctgccgaccgaagtgtctgaagcgatctacaaccgtatgcgcgccgagcgtgaagcggtagcgcgtcgtcaccgtagtcaaggtcaggaagaagcggaaaaactgcgcgcgactgccgactatgaagtgaccagaacgctggcagaagctgagcgtcagggccgcatcatgcgtggtgaaggcgatgccgaagcagccaaactgtttgctgatgcattcagtaaagatccggacttctacgcattcatccgtagcctgcgtgcttatgagaacagcttctctggcaatcaggacgtgatggtcatgagcccggatagcgatttcttccgctacatgaagacgccgacttccgcaacgcgttaatataacgactgcggtacaggtcaataaagccaccgcatcctcagggatgtcggtggttttctttttctataaggataatgaatgaatagcacaatctggctggcgcttgccctggttttggtactggaaggtttagggccgatgctttacccgaaggcatggaagaagatgatctctgcgatgaccaatttgcccgataatattttacgtcgttttggcggtggacttgtggttgcgggcgttgtggtctactacatgttgaggaaaacgattggctgaacaaaaaacagactgatcgaggtcatttttgagtgcaaaaagtgctgtaactctgaaaaagcgatggtagaatccatttttaagcaaacggtgattttgaaaaatgggtaacaacgtcgtcgtactgggcacccaatggggtgacgaaggtaaaggtaagatcgtcgatcttctgactgaacgggctaaatatgttgtacgctaccagggcggtcacaacgcaggccatactctcgtaatcaacggtgaaaaaaccgttctccatcttattccaagtggtattctccgcgagaatgtaaccagcatcatcggtaacggtgttgtgctgtctccggccgcgctgatgaaagagatgaaagaactggaagaccgtggcatccccgttcgtgagcgtctgctgctgtctgaagcatgtccgctgatccttgattatcacgttgcgctggataacgcgcgtgagaaagcgcgtggcgcgaaagcgatcggcaccaccggtcgtggtatcgggcctgcttatgaagataaagtagcacgtcgcggtctgcgtgttggcgaccttttcgacaaagaaaccttcgctgaaaaactgaaagaagtgatggaatatcacaacttccagttggttaactactacaaagctgaagcggttgattaccagaaagttctggatgatacgatggctgttgccgacatcctgacttctatggtggttgacgtttctgacctgctcgaccaggcgcgtcagcgtggcgatttcgtcatgtttgaaggtgcgcagggtacgctgctggatatcgaccacggtacttatccgtacgtaacttcttccaacaccactgctggtggcgtggcgaccggttccggcctgggcccgcgttatgttgattacgttctgggtatcctcaaagcttactccactcgtgtaggtgcaggtccgttcccgaccgaactgtttgatgaaactggcgagttcctctgcaagcagggtaacgaattcggcgcaactacggggcgtcgtcgtcgtaccggctggctggacaccgttgccgttcgtcgtgcggtacagctgaactccctgtctggcttctgcctgactaaactggacgttctggatggcctgaaagaggttaaactctgcgtggcttaccgtatgccggatggtcgcgaagtgactaccactccgctggcagctgacgactggaaaggtgtagagccgatttacgaaaccatgccgggctggtctgaatccaccttcggcgtgaaagatcgtagcggcctgccgcaggcggcgctgaactatatcaagcgtattgaagagctgactggtgtgccgatcgatatcatctctaccggtccggatcgtactgaaaccatgattctgcgcgacccgttcgacgcgtaattctggtacgcctggcagatattttgcctgccgggcgaacagtgtgatacattgctgtgtcgggtaagccattacgctatccgacacagtgttaaatcctcgcttttttccttccccgaactgaaataaattagcgacacagcttgtggctggtttatcatcaatataaatgtattttttcccgatttcccttttgaggttgatgtgcagttaacgagtttcactgattacggattacgtgcgctgatctacatggcgagtttgccagaagggcggatgaccagtatttctgaagtgactgacgtctacggcgtctcccgtaatcatatggtcaaaataatcaatcaacttagtcgtgccggctacgtgactgctgttcgtggaaaaaatggcggcattcgcctgggtaaaccggcgagtgcgatacgtattggtgatgtggtgcgcgagctggagcccttaagcctggtgaattgcagcagtgagttttgccacattacacctgcctgtaggttgaaacaggcactttctaaggccgtgcaaagttttcttacggaactggataactacacgcttgccgatttggttgaagagaatcaaccgctttataaattattgctggtggagtgacgaaaatcttcatcagagatgacaacggaggaaccgagatgagtcaagatcctttccaggaacgcgaagctgaaaaatacgcgaatcccatccctagtcgggaatttatcctcgaacatttaaccaaacgtgaaaaaccggccagccgtgatgagctggcggtagaactgcacattgaaggcgaagagcagcttgaaggcctgcgtcgccgcctgcgcgcgatggagcgcgatggtcaactggtcttcactcgtcgtcagtgctatgcgctgccggaacgcctcgacctggtgaaaggtaccgttattggccaccgtgatggctacggctttctgcgggttgaagggcgtaaagatgatttgtatctctccagcgagcagatgaaaacctgcattcatggcgatcaggtgctggctcagccgctgggtgctgaccgtaaaggtcgtcgtgaagcgcgtattgtccgcgtactggtgccaaaaaccagccagattgttggtcgctactttaccgaagcgggcgtcggctttgtggttcctgacgacagccgtctgagcttcgatatcttaatcccgcccgatcagatcatgggcgcgcggatgggctttgtggtcgtagtcgaactgactcagcgtccgactcgccgcaccaaagcggtgggtaaaatcgtcgaagtgctgggcgacaatatgggcaccggcatggcggttgatatcgctctgcgtacccatgaaattccgtacatctggccgcaggctgttgagcaacaggttgccgggctgaaagaagaagtgccggaagaagcaaaagcgggccgtgttgatctgcgcgatttaccgctggtcaccattgatggcgaagacgcccgtgactttgacgatgcagtttactgcgagaaaaaacgcggcggcggctggcgtttatgggtcgcgattgccgacgtcagctactatgtgcgtccgagtacgccgctggacagagaagcgcgtaaccgtggcacgagcgtgtacttccctagccaggttatcccgatgctgccggaagtgctctctaacggcctgtgtagcctcaacccgcaggtagaccgcctgtgtatggtgtgcgagatgacggttagcagcaaaggccgcctgacgggctacaaattctacgaagcggtgatgagctctcacgcgcgtctgacctacaccaaagtctggcatattctgcagggcgatcaggatctgcgcgagcagtacgccccgctggttaagcatctcgaagagttgcataacctctataaagtgctggataaagcccgtgaagaacgcggtgggatcagttttgagagcgaagaagcgaagttcattttcaacgctgaacgccgtattgaacgtatcgaacagacccagcgtaacgacgcgcacaaattaattgaagagtgcatgattctggcgaatatcagcgcggcgcgtttcgttgagaaagcgaaagaaccggcactgttccgtattcacgacaagccgagcaccgaagcgattacctctttccgtagtgtgctggcggagctggggctggaactgccgggcggtaacaagccggaaccgcgtgactacgcggagctgctggagagcgttgccgatcgtcctgatgcagaaatgctgcaaaccatgctgctgcgcagcatgaaacaggcgatttacgatccagaaaaccgtggtcactttggcctggcattgcagtcctatgcgcactttactagcccgattcgtcgttatccagacctgacgctgcaccgcgccattaaatatctgctggcgaaagagcaggggcatcagggcaacaccactgaaaccggcggctaccattatagcatggaagagatgctgcaactgggtcagcactgtagcatggcggaacgtcgtgccgacgaagcaacgcgcgatgtggctgactggctgaagtgtgacttcatgctcgaccaggtaggtaacgtctttaaaggcgtaatttccagcgtcactggctttggcttcttcgtccgtctggacgacttgttcattgatggtctggtccatgtctctagcctggacaatgactactatcgctttgaccaggtagggcaacgcctgatgggggaatccagcggccagacttatcgcctgggcgatcgcgtggaagttcgcgtcgaagcggttaatatggacgagcgcaaaatcgactttagcctgatctccagcgaacgcgcaccgcgcaacgtcggtaaaacggcgcgcgagaaagcgaaaaaaggcgatgcaggtaaaaaaggcggcaagcgtcgtcaggtcggtaaaaaggtaaactttgagccagacagcgccttccgcggtgagaaaaaaacgaagccgaaagcggcgaagaaagacgcgagaaaagcgaaaaagccaagcgcgaaaacgcagaaaatagctgcagcgaccaaagcgaagcgtgcggcgaagaaaaaagtggcagagtgatcaataccctctttaaaagaagagggttagattgctgacaaaatgcgctttgttcatgccggatgcggcgtgaacgccttatccggcctacataatcacgcaaattcaatatattgcagagatcatgtaggccggataaacgtagtgcatcaggcaaaacgtaaacaacgagtacattaatgagcgaaatgatttacggcatccacgcagtgcaggccctgctggagcgcgcccctgaacgttttcaggaagtctttattttaaaaggccgtgaagataaacgtctgttaccgctgattcacgcccttgagtctcagggcgtggttatccagttggcaaaccgccaatatctcgacgagaaaagcgacggtgccgtgcatcagggcattatcgcccgcgtgaagccaggacgtcagtatcaggaaaacgatctgccggatctgatcgctagcctcgatcaaccgttcctgctgatcctcgacggcgtaaccgatccgcacaacctcggcgcgtgcctgcgtagtgcggacgccgcaggcgttcatgcggtgattgtgccgaaagatcgctccgcacagctcaacgctacggcgaaaaaagtagcctgcggcgcggcagaaagcgttccgctgattcgggtgactaaccttgcgcgcaccatgcgtatgttgcaggaagagaatatctggatcgtcggtacggcaggcgaggcggatcatacactctatcagagcaaaatgaccggacgcctggcgctggtgatgggtgcggaaggtgaaggtatgcgtcgcctgactcgtgaacattgcgatgagttgatcagcatcccgatggctggaagcgtttcttccctgaacgttagcgttgcgaccggaatttgcttatttgaagcggtgcgccagcgcagctaatttctcagaattatgaaaagccatccagatttggatggtttttttttgtctatagctggtaagataattacgtattgcaaatattcattttattaatatttaaacttaatctatatggaataatatatgacatggaatccgttggcgctagcgacggcgctgcaaactgtacctgaacaaaatattgatgtaacaaatagcgagaacgcattaattattaaaatgaatgattatggcgatttgcaaatcaatattctttttacttcccgccaaatgattatcgaaacctttatttgtccggtgagtagtatcagcaatccagatgaatttaataccttcttattaagaaatcagaagatgatgccgttgagtagcgtagggatctccagcgtacaacaggaagagtattacattgttttcggggcgttaagccttaaatcttctcttgaagatatcctgcttgagataaccagcctggtagataacgcattggatctggctgaaattacagaagaatatagtcactaattacaaggacgggtatttatgggaattttaaaaagtttatttacgctggggaaaagctttatctcccaggcggaagaatccattgaagaaacccagggcgtgcgcatgctggaacagcatattcgtgacgctaaagctgaactcgataaagccggaaaatctcgcgttgatctgctggcgcgggtgaaattaagtcacgataagctgaaagatttacgtgagcgcaaagccagtctggaagcccgtgcgctggaagcgttaagcaagaacgttaatccgagcttgattaacgaagttgctgaagaaatcgcgcgccttgagaatctcattaccgctgaagagcaagtgttgagcaatctggaagtctcccgtgatggcgtggaaaaagcagttacagcgacagcgcagcgtatcgctcagtttgagcagcaaatggaagtcgttaaagccactgaagccatgcagcgtgcacaacaggctgtaacaacctctaccgttggcgcatcttccagcgttagcacagcggcagaatccttaaaacgcctgcaaacgcgtcaggccgaacgtcaggctcgcctggatgctgccgcacagttggagaaagtcgcagacggtcgcgaccttgacgaaaagctggcggaagccggaattggcggtagcaataaaagtagcgcccaggatgtattagcaagactgcaacgccaacagggcgagtaatttttttgccagcctcgctaaaaggctggcaactattttaaggataaaatatgtctggttttttccagcgtctgtttggcaaggataataagccagctatcgctcgtggtccgctgggacttcatctcaatagtggctttacgctcgacacgttagcgtttcgtttgctggaagatgaattgctgattgcgctgccgggtgaggaatttacggtagccgccgtcagccacatcgatctgggcggcggtagtcagattttccgctactacactagtggcgatgagtttctgcaaatcaataccaccggcggcgaagatattgatgacattgatgatatcaagctctttgtctatgaagagagctacggtatcagtaaagagagtcactggcgcgaggcgatcaacgccaaagcgatgggagcaatgaccttaaactggcaggaaaaacgctggcagcgattttttaacagcgaagaaccgggaaatatcgaacccgtctacatgctggaaaaagtagaaaatcaaaaccatgccaaatgggaggtccataattttaccatgggctaccaacggcaagtaaccgaagatacttacgaatatttgctgctaaatggtgaggaatcttttaacgatctcggcgagccagagtggttatttagccgcgcgttgggtgtcgatatcccgctgacaagtcttcatattattggttaattacaaggacgtttacaatgcatatactggatagtcttcttgcctttagcgcctatttttttattggcgtggctatggtgattatttttctgtttatctattctaaaattacaccgcacaacgaatggcagttaatcaaaaacaataataccgcggcgagtctggcgttcagcggtacattgttgggttacgttatccccttatccagtgcggcaatcaatgcggtgagtattccagactatttcgcctggggcgggattgcactggtgattcagttactcgtttttgctggtgtcagactttatatgcccgcattaagcgaaaaaattattaatcacaataccgcagcaggaatgtttatgggaaccgccgcgctggctggcggtatttttaacgcagcttgtatgacatggtaatggacgatcatggccagaaaacgcaaaagtagaaataacagtaaaattggtcacggagcgattagtcgcattggtagaccgaataatccttttgaaccgtgccgcaatcgctacgcacaaaaatacttaacgttggcgctaatgggcggtgccgcttttttcgtattgaaaggttgtagcgatagtagcgatgtcgataacgacggcgacggaacgttttacgcgacagtgcaggattgtattgatgacggtaataatgccgacatttgcgcgcgtggctggaacaacgccaaaacggcattttatgccgatgttccgaagaatatgactcagcagaactgtcagtctaagtacgaaaattgctactacgacaatgttgaacagagttggatcccggtcgtttctggatttttgttaagccgggttattcgtaaagatcgcgatgagccgtttgtttataacagcggcggttcctcttttgctagccgcccagtctggcgcagcacttctggtgattactcctggcgctccggttctggcaaaaaagagtcttactctagcggcggctttaccaccaaaaaagcgtctaccgtttctcgcggcggctatggtcgttcttccagcgcccgtgggcattggggaggctaatcatgctgagacacaacgttcctgtgcgacgggatctggaccagatcgccgctgacaacggtttcgactttcatatcatcgacaatgaaatctattgggatgagagtcgggcttaccgttttactctgcgccagattgaagagcagatcgaaaaaccgactgcggaactgcatcagatgtgccttgaggtggtggatcgcgcggtaaaagatgaagagatcctgacgcaactggcgatcccgccgttgtactgggatgtgatcgctgaaagctggcgcgcccgcgatcctagcctgtatggacggatggattttgcctggtgtggcaatgcgccggtgaagctgctggagtacaacgccgatacgccaactagtttgtacgagagcgcttatttccagtggctgtggctggaggatgcccggcgcagcggcattattccgcgtgatgccgatcagtacaatgctattcaggaacgcctgattagtcgctttagcgagctttacagtcgggaaccgttttatttttgctgctgtcaggacaccgatgaagacaggagtaccgtgctgtacttgcaggactgcgcccagcaggcagggcaggagagccggtttatctacattgaagatctcggtttgggcgtcggcggcgtactgaccgatcttgatgataatgtcatccagcgtgcatttaagctgtatccgctggagtggatgatgcgtgacgataacggtccgctgctgcgcaagcgtcgcgagcaatgggtggagccgttatggaaaagtatcttgagtaataaagggctaatgccgctgctttggcgcttcttccctggtcatcctaatcttcttgcgtcctggttcgatggcgagaaaccgcagattgccgctggcgaaagctatgtgcgtaaaccaatctatagccgcgaaggcggcaacgtcaccatttttgacggcaagaataacgttgttgaccacgctgatggtgattacgccgatgaaccgatgatctaccaggcgtttcaacctctgccgcggtttggcgatagctacacactcatcggtagctggattgtcgatgatgaagcgtgcggaatggggatccgtgaagataacacactgatcaccaaagacaccagtcgtttcgttccgcattacattgctggataagaatgttttagcaatctctttctgtcatgaatccatggcagtgaccatactaatggtgactgccattgatggagggagacacagtgcactggcaaactcacaccgtttttaatcaacctataccattaaataacagcaacttatacctgtctgatggcgcgctctgcgaagcggtaacgcgtgaaggtgctggctgggatagcgattttctagccagtattggtcagcagttaggaacggctgaatcccttgaactggggcggctggcgaatgtgaatccgcctgaattattgcgctacgatgcgcaaggacgccgtctggacgatgtgcgttttcaccccgcctggcacctgctgatgcaggcgctatgtaccaatcgggtgcacaatcttgcctgggaagaagacgctcgctccggcgcatttgtggcgcgcgcggcgcgttttatgttacatgcgcaggttgaggcagggagcttatgtccgataaccatgacctttgccgccacgccattgttgttacagatgttacccgcgccgtttcaggactggaccacgccgctattgagcgatcgctacgattctcacttattgccaggtgggcaaaaacgcggtttgttgattggcatgggaatgacggaaaagcagggcggttccgatgttatgagcaacaccacccgtgcagagcgtctggaagatggctcttatcggctggtggggcataaatggtttttcagcgttccgcaaagcgatgcgcatctggtgctggcgcagaccgcgggtggtctgtcctgcttttttgtgccgcgctttttgcctgacgggcaacgcaacgcgattcgcctcgagcggctgaaagataagctgggtaatcgctctaacgccagttgcgaagtggagtttcaggatgccattggttggttgttggggctggaaggggaaggaattcgtctgatcctgaaaatgggtgggatgacgcgttttgattgcgccctgggtagccatgccatgatgcgccgtgcatttagcctggcgatttatcatgcacatcaacgccatgtttttggtaatccattgatccaacagccccttatgcgtcatgtcttaagtcgcatggcacttcagcttgaagggcaaacggcgttgctgtttcgtcttgcgcgagcgtgggaccggcgtgccgatgccaaagaagccctgtgggcgcgtttatttacgcctgcggcaaaatttgtgatctgcaaaagaggtatgccgtttgtggccgaagcgatggaggtgctgggcggcattggttattgcgaggagagtgagctgccgcggctttaccgggagatgccggtaaacagtatttgggaaggttccggcaatattatgtgcctggatgtgttgcgcgttctcaataagcaagcgggcgtatacgacttattgagcgaagcatttgtggaagtgaaagggcaggatcgctattttgatcgcgcggttcgtcgtttacagcagcagctgcgtaagccagctgaagaactggggcgagagattactcatcagctattcctgctgggctgcggtgcgcaaatgttgaaatatgcttctccgccaatggcgcaggcgtggtgtcaggtgatgttagatacgcgcggcggcgtacggttgagtgagcagatccagaatgatttattgctgcgggcgacggggggagtgtgtgtgtaagcgtatacgactgatgcgacgctggtttcgattaactaaatgaaatatgtgaaaattgtaggccggacaaggcgctcgcgccgcatccggcattgttcatttgctgtagatgacactcatgcatacagtatcgcctgtacgcgccagttatcaggctgctggtcttcgtacatggtaataatgcggtaccaactcgcaccttgttcatcggcctttaacgccacgatacgttccacgtcctgcggatccccactaatattgctaacactgatctgacctatttcattcaggcccgtcacgcagtcagcactggcgaattctgcagactgtgccgtggcgctcgcaggataagtcactaattgcaggctgggactggcaagtaattgtttcatcgtcagctccatttttcgtttccccacatgttgcagggcattccatcgcggtaataaacgcccaggcttccagccggtaatttattgtgcacaggtaaacgcatagggacgcaaagcaatgtaaagctgactatgtaagttgtctgatttatttacggtacaaaatggcttgactataccactgtcctgtcacgatggtttcgtccaccatgacgacaacgtaataatcagcttttgcagcgacagctttcgctttgatttctgctaatgcgtcatccggagaaccccgaaccatcgtgcttacgctacctattcgctgtaacccttgcgtctggtcgcggcgaatctcttgcggatggtccgttactggcggtgctggctgtggcgtaccttgcagtgcgctacaggcacttaacatcaacaccaataataaactggcaaaccggtaaataacgctattacgtttcctgctaaccatagtgtagtgccttattaatttaactttgggggaatgttcccgaattgttacctggtacgcgattttcgaatgaaaacgtgacgaaagcgtaacccacatctcaacattatgaactaataccgccagcagaaacttgtgctaaggatttcttcatgtcataccagacaaaaaggagagacagatgattgaaatagaaagtcgcgagctggcagatattcccgttcttcatgcttatcctgtcgggcaaaaagataccccgttaccgtgcgtaattttttatcacggctttactagttccagtctggtgtatagctattttgccgttgcgctggcgcaggctggtttgcgggtgatcatgccggatgcgcccgatcacggtagccgttttagtggtgacgcagcgcggcggttaaatcaattctggcaaatcttgctacaaagtatgcaggaattcactactttacgtgcggcaatagccgaagaaaactggctgcttgatgaccgtctggcagtcggtggcgcgagcatgggcgcgatgacggcactggggattaccgctcgccaccccacggtgagatgtaccgccagcatgatgggaagcggctattttacaagtctcgcccgtagtctgtttccaccgctgatacctgaaacggcagcacagcagaatgaattcaataacattgtcgcgccactggcagagtgggaagcgacaaaccacctggaacaacttagtgacagacctctactgctgtggcatggcctcgacgatgacgttgtgcctgccgacgaaagtctacgtttgcagcaggccttaagcgagacgggacgggataaactgctaacctgtagttggcagccaggcgtgcgtcaccgcattacgcctgaggcgttagatgctgccgtgacatttttccgccagcatctttaaacacgcagaatgctgaccccttgcgcttccagttgttgcaggatttccgggttagcatttttgccggtgataagcatatcgatttgatcggcacggctaaaaagcattcccgcgcgttcgccaatcttactgctatcaaccagtaccaccagtttccctaccacgctcagcatcttctgctctgccattgctgtcagcatatcggttttatacaacccttctgcggtcagcccttttccgctggtaaacatccagtgcccggcatagagactgttttcgctgccctgcgggcttaaagtgatggactgacttttgttgtactgtccgcccataatgatcacgctgtcatgttcttgatcgatcaggtaatttgccagcggtagataattagtgatgatttgcactggcttgccacacatttcccgcccaagcagaaacgcggtggagccgcagttgatgactacgctttcgcccggattaaccagctggctggccgctttagcgatacgtactttttcatcgtgattctgcgcctgatgcagattcatcggcgtccagcgcgggcgctgttgggtaatagcttctgcgccattgcgcacttttttcagtttgccgctttcgtcaagtttattgatatcgcgtcgcgcagtggcagggctaattcccagacgctcaacgactttctcaacggtcacaaagcccaattgtgcgagcatttccaggaggatttgatgtctttgtgcttcagtcatgagctattccgataaaatttgatttttttagatgatatttgaaatagccaggaaatactacgccggatagcgcgaacttctccacgctacccggtataaacgacagattacaggaaactcttgaacggcagatccggttcaatagtgaagcaatcatcgaaaccgcgcggatagtggtactcgaagttgtctttatccagcggccaggtaaatttgccacccacctgccagataaacggcttgaagccatacttcaggcgatcttttttcatctcccacagcacgcggatctcttgcggatcggcctggaagttactccagatatcgtggtggaacgggatcactactttcgcattcagcgcttcacccatacgcagcatatcggcgctggtcattttgtcggtgataccgcgcgggttttcgccgtagcttcctaacgccacgtcgatctgatgttcgttaccgtgcttcgcataatagttagagtagtgggagtcgccgctgtgatacagggagccgccaggcgttttgaacaggtagttcaccgcgcgatcgtccatgccatctggcagtacgccagccgctttttgatcggcaggcagggtgatcagtgcagtacggtcgaaagcatcaagcgcatgaatttcaatgtctttcacttttactacatcgcccggtttgaccacgatgcaacgctctttcggtacgccccagccaatccacaaatccacacaggttttcggtccgataaacggtacgtcatctgcacaattctgcatcacggcagcagcgacgttaacgtcgatatgatcgttgtgatcgtgagtcgccagtaccgcgtcgatctggcgaatcgcaaacggatcaagaacaaacggggtggtacgcaggtttggctgcagttttttcacgccagccatgcgctgcatctggtgaccctgtttcattaacgggttaccgtgactttgtttgccagtgccgcaccagaaatcaacgcaaacgttggtgccaccttcgcttttcaaccagatcccggtgcagccaagccaccacatcgcaaatgtgccaggagcgacctgttcttgttcaatttcttcattcaaccagctaccccactccgggaaagtgctcaggatccaggattcacgggtgatacttttcactttactcatcgccatttaccttcatgatagttcaattcgaatcaatatgtgattggttttgattaatcctgacactattttttcaggaaggcaatgaccattttttgactttttgccagggaagttgttgttgattttgagtatggaaagatttaatggaatgtgtaattcaattaactaaatgaatttaaatggataattgtttcgttgtgtgaatcccactctatccatgtggaattatttgcgggtcgcgtcacatttaatcataaataatcttgttgtgattacttttgaaaattagagtgagtgcacaacattccgggtgtgtggaatacccggttacctcttcttcaggagatcgttatggagatcctctacaacatctttaccgtgttttttaaccaggtcatgaccaatgccccgttgttgctgggtattgtgacctgtctgggctacatcctactgcgcaaaagtgtcagcgttattattaaaggcacgattaaaaccataattggtttcatgttgttgcaggcagggtccggcatcctcaccagcaccttcaaaccggtggtggcgaaaatgtccgaagtctacggcattaacggcgcaatttccgatacctacgctagtatgatggcaaccatcgaccgcatgggcgatgcctatagctgggtgggttacgccgtattgttagcgctggcgctgaacatctgttacgtgctgttgcgtcgcattaccggcattcgcacaatcatgttgaccggccacatcatgttccagcaggccgggttgattgccgttacgctgtttatcttcggctactccatgtggaccaccattatctgtaccgcgattctggttagcctctactggggcatcacttccaacatgatgtacaagccgactcaggaagtgacggatggctgtggtttctccatcggtcaccagcagcagtttgcaagttggattgcctataaagtcgcgccgttcctcggcaaaaaagaggagagcgttgaagacctcaaattgccgggctggctgaacattttccacgacaacatcgtctccacggcgattgtgatgaccatcttctttggtgccattctgctctccttcggtatcgacaccgtgcaggcgatggcaggcaaagtgcactggacggtgtacatcctgcaaactggtttctcctttgcggtggcgatcttcatcatcacgcagggtgtgcgcatgtttgtggcggaactctctgaagcatttaacggcatttcccagcgcctgatcccaggtgcggttctggcgattgactgtgcagctatctatagcttcgcgccgaacgccgtggtctggggctttatgtggggcaccatcggtcagctgattgcggttggcatcctggtcgcctgcggctccagcatcctgattattcctggctttatcccgatgttcttctctaacgccaccatcggcgtgttcgctaaccacttcggcggctggcgtgcggcgctgaagatttgtctggtgatggggatgatcgaaatctttggttgcgtctgggcggtgaaactcaccggtatgagtgcctggatgggcatggcggactggagcattctggcaccgccgatgatgcaaggcttcttctccatcggtatcgcctttatggccgtcatcattgtaattgcactggcttatatgttcttcgctggccgcgcgctgcgcgcagaagaagatgcagaaaaacaactggcagaacagtctgcttaataaggagttttgattatgaccgtacgtattctggctgtgtgtggcaacggacaaggcagttccatgatcatgaagatgaaagtggaccagtttttaacccaaagtaacattgaccatacggtaaacagctgcgcggttggcgagtacaaaagcgagttgagtggcgcggatatcatcatcgcttctacgcacattgcgggcgaaatcaccgtgaccggcaacaaatacgtggttggcgtgcgcaacatgctctctcctgccgactttggcccgaaactgctggaagtgatcaaagagcatttcccgcaggatgtgaagtaaggacgcgccatgaaattacgtgatagcctggcggaaaataaatccatccgcctgcaggctgaagcagagacatggcaggaagcggtgaaaatcggcgttgacctgctggtggcggcagatgtggtagagccgcgttactaccaggcgattctggatggcgttgaacagttcggtccttatttcgttatcgctccgggcctggcaatgccgcacgggcgtccggaagagggcgttaagaaaaccggtttctctctggtaacgctgaaaaagccgctggagttcaaccacgatgacaacgatccggtggatatcctcatcaccatggcggcggtcgatgccaatactcaccaggaagtgggcatcatgcagatcgtcaacctgtttgaagatgaagagaattttgaccgtttacgcgcctgccgtaccgagcaggaagtactggatctcattgaccgcaccaacgcggcagcttaagaaggaattgaacatgagtttaccgatgttgcaagtcgcgctggacaaccagactatggatagcgcctacgaaaccactcgcctgattgccgaagaagtcgacattatcgaagtgggcaccattctgtgcgtgggcgaaggcgtgcgtgcggttcgtgacctgaaagcgctctacccgcacaaaatcgtactggcagacgccaaaattgccgatgcaggcaaaatccttagccgtatgtgcttcgaagccaacgctgactgggtgacggtaatttgctgtgcggatatcaacaccgccaaaggcgcgctggacgtggcaaaagagtttaacggcgacgtgcagatcgaactgaccggttactggacctgggaacaggcgcaacagtggcgcgatgcaggcattgggcaggtggtttatcaccgcagccgtgacgcgcaggccgcaggcgtggcgtggggcgaagcggacatcaccgcgatcaaacgtctttccgatatgggcttcaaagtcaccgtcaccggaggcctggcgctggaagatctgccgctgttcaagggtattccgattcacgtctttatcgcgggccgtagtatccgtgatgccgcttctccggtggaagccgcacgtcagttcaaacgttccatcgctgaactgtggggctaaggagcggatatgttgtccaaacaaatcccgcttggcatctatgaaaaagcgctccccgccggggagtgctggctggaacgcctgcaactggcaaaaacgttaggcttcgattttgtcgaaatgagcgtagatgaaactgacgatcgcctgagccgcctcaactggagccgcgagcagcgtctggcgctggtcaatgcgattgttgaaaccggcgtgcgcgtgccgtccatgtgcctttctgctcatcgtcgtttcccgctgggcagtgaagatgacgcggtgcgggcgcaggggctggagattatgcgtaaagctatccagttcgcccaggatgtcggtattcgcgtgatccagctggcgggctatgacgtttactatcaggaagccaataacgaaacgcgtcgtcgtttccgtgacggcctgaaagagagcgttgagatggcaagccgcgcgcaggtgacgctggcgatggagatcatggattatccgttgatgagctccatcagcaaggcgctgggatacgcgcactatctcaacaatccgtggttccagctctacccggatatcggcaacctgagcgcgtgggacaacgatgtgcagatggagttgcaggccggaatcgggcatatcgtcgcggtacatgtgaaagacaccaaacctggcgtcttcaaaaacgtgccgtttggcgaaggtgtagtggatttcgaacgttgtttcgaaacgctcaaacagagtggctattgcgggccgtacctgattgagatgtggagcgaaacggcggaagacccggcggcagaagtggcgaaagcgcgtgattgggtgaaagcgcgcatggcgaaagcgggcatggtggaggcggcataatgcaaaagctaaaacagcaggtatttgaagccaacatggagctgccgcgctacgggctggtgacctttacctggggcaacgtcagcgctatcgaccgcgaacgcgggctggtggtgatcaagcccagcggcgttgcctacgaaaccatgaaagcggccgatatggtggtggttgatatgagcggcaaggtggtggaaggggagtatcgcccatcttccgacactgcgacgcatctcgaactctaccgtcgttacccgagccttggtggcattgtccatacccactccactcatgccaccgcatgggcgcaggcggggctggcgatcccggcgttaggcaccacgcacgccgactacttctttggcgacattccgtgtacgcgcgggttaagcgaagaagaggtgcagggcgagtatgaactgaacaccggcaaagtgattatcgaaacgctgggcaacgccgagccgctgcatacgccgggaattgtggtgtatcagcacgggccgttcgcctgggggaaagatgctcacgatgcggtgcataacgcggtggtgatggaagaagtggcgaaaatggcgtggattgcccgcggcattaacccacaactcaatcacatcgacagcttcctgatgaataaacacttcatgcgtaaacacggtcctaacgcttattacgggcagaagtaaaacacgcgctgcggaaatttccttcctcgggagataactggtctaattccgcagccgtttttcaaaaaaaagccccctgcgaagggggcaaagcaaactatggcaatgtttcgttggttatacctggtgttagcgataaatatccgcgctggcgtgcatattgccgttactccccggttcccgcatcagaattacgtggtagtacgttgcgccttgcgcatctgtttcttcatttaatgcctgacgtgcttcgctttcagtggcgaaattatgattgatataaatcacgcctaagctttgcacatcgtccatatttctggcctggtggttattaatttcaatggctgcccatgtatttgcacttagcaaaagcacagccagaagggctaaaacacgactgaacatagatacctcctcgacggctgactttgtgtgctctcctctgtgatgatcttctgatttaattttaatcaatgataaagaagttgatggtgaccatttctgatgcagttgttcaaaaaaacaccatgatgaagtgtgatgaacttcaaatcagcgtgttagaggttaattgcgaaaggggagatttatttcggctctgcccttgagtttagcgaggcatacaagtactataacgcgtcatttttcagccgacctttaacacgttccttgcctccccgggattcggctgacccagacaggaggctgaataatccgtaaggagcaattcgatgcgtcattacgaaatcgtttttatggtccatcctgaccagagcgaacaggttccgggcatgatcgagcgctacactgctgccatcactggtgcagaaggcaagatccaccgtctggaagactggggccgccgtcagctggcttacccgatcaacaaactgcacaaagcacactacgttctgatgaatgttgaagctccgcaggaagtgatcgatgagctggaaactaccttccgcttcaacgatgccgttatccgcagcatggttatgcgtaccaagcacgctgttaccgaagcatctccgatggttaaagcgaaagacgagcgccgtgagcgtcgcgatgatttcgcaaacgaaaccgctgatgatgctgaagctggggattctgaagagtaatttctgatgaccaaccgtctggtgttgtccggcaccgtgtgcagggctccccttcgaaaggtcagtccaagtggaattcctcactgccagttcgtgcttgagcatcgttctgtgcaggaggaagccggctttcaccggcaggcgtggtgtcaaatgcccgttattgttagcggacacgaaaaccaggccattactcacagtataacggtcggcagtcgcataaccgttcaggggttcattagttgccacaaggcaaagaacggactgagcaaaatggttttgcatgccgagcagattgaattgatagattctggagactaaccatatggcacgttatttccgtcgtcgcaagttctgccgtttcaccgcggaaggcgttcaagagatcgactataaagatatcgctacgctgaaaaactacatcaccgaaagcggtaagattgtcccaagccgtatcaccggtacccgtgcaaaataccagcgtcagctggctcgcgctatcaaacgcgctcgctacctgtccctgctgccgtacactgatcgccatcagtaatcggtcacggtccattaatacgactttgagaggataaggtaatgcaagttattctgcttgataaagtagcaaacctgggtagcctgggtgatcaggtaaacgttaaagcgggctatgctcgtaacttcctggtaccgcagggtaaagctgttccagctaccaagaaaaacattgaattcttcgaagctcgtcgcgctgaactggaagctaaactggctgaagttctggcagctgctaatgctcgcgctgagaaaatcaatgcactggaaactgttaccatcgcgtctaaagctggcgacgaaggtaaactgttcggttccatcggtactcgcgacatcgctgacgctgtaactgcagctggcgttgaagtggctaagagcgaagttcgtctgccgaacggcgttctgcgtaccactggcgaacacgaagtgagcttccaggttcacagcgaagtattcgcgaaagtgatcgtaaacgtagtagctgaataattcgttattcaacgagacgtaaaaacgccgaccattggtcggcgttttgctttctatttttcgtcaggtattagtttcgcaagtagatccattcaccattctcttgtgtccataagtcaggatggtttgctggcgttagatacatacgagcgcaactgatgtctcgctcctgcggcactcgctcgaaacccaaaccgctgtagattgcggcactactacttaaggaacgcagaccaattttcaaatcatggggtaaatcagaatacgcgtttagcaatgcagcaatgatgaatccgagggcattagaaacgcctgtaacagtgcgaagttggtcgatataaagatcgattgttggtagttcagaactccagcaattaggcatttgggcaggaagggttacaacgtatcctatcgtttggccggtatagtctggagtaccataaccaggtcccaaaaccacttcgtgtattgtgtatttactgttgggttcgaaggattcgacatcttgcaataaatatttcagttctgcggttaacctcgcacccgcgtaagctttattgtatttctgggcgtgaatattatctaatgtagcttcatggttccatccaaaagaattatcaccattcattgtgattccatcgtaagcattacacctcgtcgctaacttattgaatgcttgccagtcactgagatctagtttgtggatctcaacagtacgtctgccatcgcaattatgatctcttccacgattactaagtaatgtagcgcgtgcgtattgatgaaattttaattttactggtttgtcggtggagctaaaacgagataaatatgcaggaaaactataaatagtcgttggtaatgtcattgtaatgttacctgtttaatgtttttataaatatcgcagctgaatgttcacagaaaaaaatcgatattaataaaaataagtttgttttctgaagtggtgaaaatagcggatggtgaaagatattaatatcaaaaatcgctcattatggatataacgatgcacccggggagaaaatgacttccacgccttacaccgtacattcttgttgtgcggtatgtaattattctacgctgtcggtatcggtgtattcgttaatcagcaggttagccagccacaaaaagccattgagaaaattattgattttacatgggattattatattgctaatccttggtttttaaaaattgtgcatagtgaaaatcaaagtaaaggtgtgcattatgcaaaaagtcagcgtctcttagaaattaaccatgcgcacttgcagttaatggaatccttattggatgaagggaagaaacacaatatttttaagccagatatcgacccattgcaggtgaatattaatattgctgcgcttggcggatattatttgatcaaccagcatacgcttggcctggtttatcacatcagtatggttagtccccaggcactggaagccagacgtaaggtcatcaaagagacaatccttagctggcttttggttgaccctagttctaccgcgcacgaataattaccgcgcacgaataaaactgccatccggctggcgggtgaacaggacctgttgattattccccgtatcaatggttaagcccgtcaccacgccgctggcgttctggcggattttcaccatctgcccgttttgcaaattactcagcggcttacccgcgccttctacctgcgccattgcatagacatcggtagcgggcagtccgtggtcgcggaacagctgcgccatcgttttaccgggttcgacacggtaagagcgccattgattatcaattccgctatctggctggaatggttgcgtttgggtagtttgcggctgctcttctggctggccttcctgtataggttctggagcgaccggagccacctgatcaggaccattttgtggggtaactaattgcgcccgcagctgttcttctgtcggcggttgactttggctctgaatatctaactgcgcttcacgcgtcaccaccggcgcgttgggcgtatcatcagatggaagcagaaatccgaccaccaatacaatggcggcaataatgatcccccgacgatgcatcggcggcagcgggtccatgaagcgaaaattgtccggcgcgtgccagactttctccagggttggttttagttcaaagcgcccgggcatggtttcctcctgctccgcgtcttgttcctcaatcatagcctatgaataagctaacgctatgatgtccgtggtaaacccgcctttattatattcatacgggatattgctattgtttctttttccctgggatttgtcatcattcccgcgacaaagttttacccaaagaagtgtggctgatatgctgcccgctactttataccctaagaaaggaaatacgatgaccaccccaacttttgacaccatcgaagcgcaagcaagctacggcattggtttgcaggtagggcaacaactgagtgaatctggcctggaagggctgctgccagaagcactggttgcaggtattgccgatgcgctggaaggcaaacatccggctgttccggttgatgtggtgcatcgcgcgctgcgtgaaatccacgagcgcgccgatgccgttcgtcgtcagcgtttccaggcgatggctgctgaaggtgtgaaatacctggaagaaaacgccaaaaaagaaggtgtgaatagcaccgaatctggcctgcaattccgcgtgatcaaccagggtgaaggcgcaattccggcacgtaccgaccgcgttcgtgttcattacaccggtaaactgatcgacggcaccgtgtttgacagctccgttgctcgtggtgaacccgctgaattcccggttaatggcgtgatccctggctggattgaagcactgactctgatgccggtaggttctaaatgggaactgactatcccgcaggaactggcatatggcgagcgcggcgcaggcgcatccatccctccgttcagcaccctggtgtttgaagtcgaactgctggaaatcctctaagcagcgcattctgttcccctcgaacgagaggggagcaggcattcagcaataaacccttcagtttgccaaacggcgctattttgtgttgcaaagaccccgtaagcgtgtatttttgtgagctgtttcgcgttatcaccgtgatatgacactcactttaaacataaaattaacattagatctaaatcttagtattcatcccgcgtattgttacctaatatcgatgagtcccgatacagattcgtcgtatcatagactgactaaaggccgtagagcctgaacaacacagacaggtacaggaagaaaaaaacatggtagatcaggtaaaagtcgttgccgatgatcaggctccggctgaacagagcctacggcgcaatctcacaaaccgacatattcagcttattgccattggcggtgccattggtacggggttgtttatggggtctggcaaaacgattagccttgccgggccgagcatcattttcgtttatatgatcattggttttatgctctttttcgtgatgcgggcaatgggggaattgctgcttagcaatctggaatacaaatcttttagtgacttcgcttccgatttactcgggccgtgggcaggatatttcaccggctggacttactggttctgctgggttgtaaccggtatggcagacgtggtggcgatcacggcttatgctcagttctggttccccgatctctccgactgggtcgccagcctggcggtgatagtgctgctgctgacgctcaatctcgccaccgtgaaaatgttcggtgagatggagttctggtttgcgatgatcaaaatcgtcgccattgtgagcctgattgtcgtcggcctggtcatggtggcgatgcactttcagagtccgactggtgtggaagcgagtttcgcgcatttgtggaatgacggcggctggttcccgaaaggtttaagtggcttctttgccggattccagatagcggttttcgctttcgtggggattgagctggtaggtacaacagctgcggaaaccaaagatccagagaaaagtctgccacgcgcgattaactccattccgatccgtatcattatgttctacgtcttcgcgctgattgtgattatgtccgtgacgccgtggagtagcgtagtcccggagaaaagcccgtttgttgaactgttcgtgttggtagggctgcctgctgccgcaagcgtgatcaactttgtggtgctgacctctgcggcgtcttccgctaacagcggcgtcttctctaccagccgtatgctgtttggtctggcgcaggaaggtgtggcaccgaaagcgttcgctaaactttctaagcgcgcagtacccgcgaaagggctgacgttcagctgtatctgtctgctcggcggcgtggtgatgttgtatgtgaatcctagtgtgattggcgcgttcacgatgattacaaccgtttccgcgattctgtttatgttcgtctggacgattatcctttgcagctaccttgtgtatcgcaaacagcgtcctcatctacatgagaagagcatctacaagatgccgctcggcaagctgatgtgctgggtatgtatggcgttctttgtgttcgtggtcgtgttgctgacactggaagatgacactcgccaggcgctgctggttaccccgctgtggtttatcgcgctggggttgggctggctgtttattggtaagaagcgggctgctgaactgcggaaataaccgcattatcatgctggatggcgcaatgccatccagcttttagatcactcacccgccagcgcgcgtgggaacagtacattgttttccagactgatgtgatccatcaggtcatcaatcagttcattaatgccgttatacatcgctttccaggtggtgcaggcttctggcggcggtgtgacgttattggtggtgtgtttaatcacttccagcagttcgcccgcttcatcgtgctcgctttccattacgctgattggccccattgcctggctgcccatgccttgtttgatcatcgggaagaggatctgctcttctttcatcatgtggctggaaagctcttcatgcagcatggtcaggtattttgtcagcccttttggcacgctcggtttgtcggcgtgaacgcgctcgactttagtcgcttgcagaatcagctccggcagttgctcgcggtgacgatcgtggtagcgcacgatgatatggtcgatgatttctgccagcggggcgctacgccagtctttctcaatcggttgttcagcgagctttgccagttcagcttcaatgacctcaacatccagttctttacgtgccgccgcgcgcgccagcgtctgcttaccgccacagcagtaatccatatcatatttacgaaacagagcactagcgcgaggaatagagagcgccagttcacctaaaggttggtcgcgataagccatagctgatacctcattcttaataagataagatgtattttaaatgcatctttaaggcaaaagctataacccttacgtagcagaggcttatttaactcactgccagcgtgtcaactttcactgacagattcagttaaaggtttttctggttttgctctgaccgcgatgaccacgccaatcactaacagcgcgataccgctcagcgtcattagcggcggcatttgctggcggagtaaaaaggtgtacagcaaacctgccagcgtttcgaaaacaatcagcggcccgagaatcactgtcggtaatagctggctggcgacgttccagcagagtgcgccaacccaactgcaaagcacggctatcgcaaccatcagactaataaacaccagcggacgggggccaaagggtagggagaagtccggcgtttgcgtattcagccagtaacaagcgacgagatagccgataagactaaccggcagtgtgaccagcgcctgcgctgttgcccacatcatcggatgtttgtcgggattttcccgcagccagcgggcgttgcgcagggcataccacgcccagcagaccacggaaactaacgccagcacgatgccagaggtataacgtgcccagtcaaaatcggggagtccgtggtttaactcagcaatattcacacacgccaggccgatgccaatacaaatcagtgctggggcgagttttccccacgcgagtttgccgtcgcgctggctataaagcagattggcaaagacaggaatgaccaccggcagggtgccgataatcatcgtggaaacaggcgcgccagtacgttgaatggcactggcaaggcagaagtaatagatgaggttgcccatcatagtgagcatcaaggcggtaagccagtcgcgacgcgccaactgacgcagacgcacgcgtcccagccaggcaatgggcagcgcaattaaccctaacgccagataacgccccatgctctgcaacatcgccgggtattccggcacgatcaacggcccgacaaaaataagcccccacatcaaccctgctaacagggcgtacagcacgccgctaatcattactggcatccattgatctgtcagaagaaagttcaggaagcagacatgattgctcccggcatcccgtcattatcagagaggatgcgggaggatgccactttaattaattagttattaacattaaaaagatggcttacgctttcggctaacgttgtcgttgggtggccaatcaatttgctaagtgttttgctgtcatcaaacagaccgcctttgcttgcgccaacgtcagaatccgccagcatatccgccagtccgtcgggcagtccgacgcttttcagtgccgcggcgaaatcggcttcgctcagattttgataggtaacctgtttgccgctctgtttggtcagctctgccgctaactgtgtcaacgtccaggcactatcgcccgccagttcgtaaaccttgccttcgtgaccggcttcgctaatcacgcgtgccgcagctgccgcataatctgcccgcgttgcactggcgattttgccatcgcccgccgcaccgataaatacgccgtgttccagtgctgccggggcgctggcgaggtagttttcgctgtaccagccgttgcgcagcagggtgtaaacgatgccagaatcagccagcattttctccgtctcgatgtgctcatcggcgaggccgagcggggaggtatctgcatgtagcaggctggtataagcgataaatttcacgccagccgcctttgcggcattaataacattacgatgctgcggggcacgttgacccacttcgctggaagagatcagcagtagtttttccactccctgaagtgcagatgtcagtgcggcttcatcgccgtagtcagcctgacgcacggtaatgccttgtgctgccagggcttgggcttttgccggattacgaacgatagccactatttggctggcaggaaccgttttcatcaaggattcaataacatagtgaccaagttggccagtggcaccagtaatagcgatcatgggaagtctccatcgttttgtcttgtgtttaaatacgctaacacctaaacttacttttagtaagtacgtacaaaaaggtaagtatgaaatgagtcaggttagcctgagccaacaactgaaagagggtaatctctttgcggaacagtgcccgagccgcgaggtgttgaaacacgtcaccagccgttggggggtgttgattctggtggcgctacgcgaaggtactcatcgctttagcgacctgcggcgcaaaatcggtggggtgagtgaaaagatgcttgcgcagagcttacaggcgttagaacaggatggttttcttaaccgtatcgcgtatccggtggtgccgccgcatgtggaatatagcctcacgccgctgggcgagcaggtgagcgaaaaggttgctgcactggcggactggattgagttgaatttgcccgaggtgttggcggtgcgggatgaacgtgcggcataactgccggatgcgctgagcttatctggtctacggtgcatggcttgtagggcggataagatgcgccagcatcgcatccgccaataaatgccggatgcggttgatgatttataggccgaaaaagaagtgttttacttactcaaatccacctgataaatcgcaaacccgatatcatcggtcgcgactttattcatcggatactgccctttctctttaataaacgctgcggctttatcactcggagaggtttcgaaacggatatccagtttcttatcgccagctatcggtgctaaacgccagttgttatctgccgccgggtgaatttcccccgcacgtttgctctcatcagcaatccacgctgccagcacgctgcggttctcatccggactagcaaaagcgatatggctgtcgcccgtaccggcaaatttgccgccgtaagcgcgatagttattggtggcaaccaggaacatggcgttcggatcaatcggcttgccattaaaggtcaggttcttaatcctttccgcattggcattaatcatctggcactcgccgtcataacgggcgggctgggtaacatcaatctgataattcacaccatcaataacatcaaagttataagtgcggaaaccatcccagttgatgagactctgtggtttcgtgctgttgggatcaatctggttaaactgtcccgcggagcactccagccactctttcacctctttaccgctggctttcaccacaatcagcgtattgggatagagataaagatcggcggcattacggaaggtcaactggcctttttccacctccacatagcttgccgggtcatttttgcgaccaccgactttaaacggtgcggcagcactaagcaccggcagttttgccagatccggatcgccctgaatgtaatgctcgacatacgctttttgcgcgttgttcaccacctgcacggtcggatcgtcctgcaccagcgccagatagctatacatattgtcggcagatttaccgattggcttgctgacgaactggcgtgtggcatcgtgatcggctttgagtgtttctaccagcttgctgtcttccgccgcgagggattttttattagcgatgtcgtaaatcggtcgtgcttccgctttcgcctgcgtcacctgccatttaccgctgtcattactgagttgtaagtcgaccacaccaagatgatcgccccacatgcctggcattaccgccggaacaccattcagcgtgcctttggcgatatcagccccttcgatatcagcaaaatctttacctgggaaaacggcgtgagcatggccaaacataatggcgttaacgcccggaatttcactgaggtaataaacactgttttccgccatcactttatacggatcggcagatagcccggaatgtgccagaacgacaacaacatcggcacctttctcgcgcatttcaggcacgtatttgcgcacggtttcggtaatatcattcaccgtcactttcccggataaattagctttatcccagcccatgatttgtggtggcacgacgccaatatagccaatcttcagcgtctgtttttttccgtctttatcgaccacttcggtgtctttaattaaatacggtgtaaacattggctgtttggttctggcgtcaatgacgttggcatttacataagggaatttcgctcctgccagcgcatttttcaggtaatccagaccgtagttaaactcgtggttgccaagcgttccgacggtatagtccagcgtatttaatgccttatagaccgggtgaatatcacctgcttttaatcctttcgcgctcatgtaatcggccagcggactcccctgaatcaaatcgccgttatcaaccagtacgctgtttttcacttcattgcgggcatcgttaatcaggcttgccgtacgtaccagtccgaatttttccgtggcggtgtctttgtaataatcgaaatccatcatgttgctatgcagatcagtggtttccatgatacgcagatcgaccgtcgctgcattcacactggcggcaatcagcgtggccaggagcgttgcgctaaacttaatcatcagggacatccttttatcatcgggaatacgaaagaaaagggagaataaacgtcttacttatagaacagtgaagaatgccacaattttacgctttgaaaatgatgacactatcacagttggcgcattcattaacgatagggtataagtaaaacaataagttaacaccgctcacagagacgaggtggagaaatgttagatcaagtatgccagcttgcacggaatgcaggcgatgccattatgcaggtctacgacgggacgaaaccgatggacgtcgtcagcaaagcggacaattctccggtaacggcagcggatattgccgctcacaccgttatcatggacggtttacgtacgctgacaccggatgttccggtcctttctgaagaagatcctcccggttgggaagtccgtcagcactggcagcgttactggctggtagacccgctggatggtactaaagagtttattaaacgtaatggcgaattcaccgttaacattgcgctcattgaccatggcaaaccgattttaggcgtggtgtatgcgccggtaatgaacgtaatgtacagcgcggcagaaggcaaagcgtggaaagaagagtgcggtgtgcgcaagcagattcaggtccgcgatgcgcgcccgccgctggtggtgatcagccgttcccatgcggatgcggagctgaaagagtatctgcaacagcttggcgaacatcagaccacgtccatcggctctagcctgaaattctgcctggtggcggaaggacaggcgcagctgtacccgcgcttcggaccaacgaatatttgggacaccgccgctggacatgctgtagctgcagctgccggagcgcacgttcacgactggcagggtaaaccgctggattacactccgcgtgagagcttcctgaatccggggttcagagtgtctatttactaaattcagatggcagaaacagtgtatttcctgattctgccatcctgatttctcccaacctaaaaagttataaataaaaagagattgtatttaaagtgcaaaaattcaattgctaataagttacattttaataatgagcgttttttgatagtttacttctatagtgagatatttaatggcgacataaagtaaccaaataaaataaggttgtcatatgttacccaggatcagacacaataattttattggtgcggtggagttatttgtaaagtctagctatacaaaaacacatagtaacaatttttttaacaacatccatcatgcatttaagaaaaaagattggattagcaattatgatagcctgttaactttgagggagttctttcgttgcgcaactcagattgataaaagtggttatcaggtgcttagtagtaaaaatgaaactgttcacgccatggataagtttcttatcagtttcagccttaaagataacggtgccgaatatacaatgacattgcgaggtagtggatttgaatacgaagaaatacccataacaataaatgaatataacagtttcatggatttcaaaaaccgtgaatttccgttagaacaaaacagacgattgtatgcccgggatattctacagaaaaaacagtctgacataccgaaaaggattaaaggttatattcaccaggcgattggtgacgtgtctttaggttatgccttattggaggatatagtaagcaaattaaaacggggtaaatttgaactccaaataccaggaggtggaattaaagaatgcgatggatggtatatttacgaaaaaataattgatgataattttgccatagtcatagaatctttgggctttgcgcttaaaatctatggaggggatgaacgttttcgtaatggttcctctgttgttttggaggatgaagattactctcttatttataattttctggttaatgcaggttgccaacaagtcgaattagccgaacaagtggatgcgatagtaagtgcgaatctggccgcagatagcgatattaccaaagaaaagatttgcgagaaatataaaagcaccattgaggcgtttaaaaaagagcaactagcgttaccagtattagttcggcgtaagaacagtgagacttaattcccctatcccatagataacgataggggaaaattatttttgcagaatttatgttattgccattatttgagcaacttttgcagcaggtccatcacttgctgcacctcttccggtgtgagcgccccgtctttggcccattgcacgcgaccatccttatccagcaccactacagcggaactttcttcatccagctgccaggcaccgagcgcgacgccattgctatcgacaataaactggctccagggataaagctttttattactctccagactgctgcgcacaaacatcccactacccggaatcgcgtcgtcggtgttaacaatggtggtggtctggtaacgatcgtgcggtaacttcgcacttttaatcgcttcaatcagcgtcgcgtttttctcttttgcagaggtgcgaccagcaatatgttgcagtactcgcacttttcccactaactgcgcgctgttccaggttttgtagctaaactgatctttatcaagcaccaactcgccccgatcggtaatgccaatcggcggcactcgctgaccggtttcgaactgatgtgcggaagccatcatcggcaacagcaggcaggtgagtgccagaatcttgcgtagggtcatggtgtttccttcttatgatatgcaggtgatccgaccacttgggtctgagttttaatcatatgtgctatttatcgaatttcccgcaagtgtgatgccagtttgcggtcaagcgcacaaatcatatgaaaaatgaatgcttatactgaagaccgcgcttcggtaaaaagataattctgaataattgtaacctttaggtaaaaaaagttatacgcggtggaaacattgcccggatagtctatagtcactaagcattaaaatttgcgcctcataatagttgggccgattgtggcaccgcacaggcgtaatactcagcaggagataacaatgaaaattttccaacggtacaacccacttcaggtggcgaagtacgtaaagatcctgttccgtggacggttatacatcaaggacgttggcgcttttgaattcgataagggtaagattcttatcccaaaagtgaaggataagctgcatttgagtgtgatgtccgaagttaaccgtcaggttatgcgtctgcaaacagagatggcttaaccaaagtgctatgcagtaaaaagtgctatgcagtaataagacggctcctgattcaggagccgttgatgtttctgggggttacgcgacgctttcttctttatctttagcgtcaggcagttttgggctaagggcggtggccttgctgtcgatccgggtcaccagcagctggtcgatgcggtagttatcgatatccaccacttcaaatttgtagccggcgaatttcacgctatcggtgcgtttcgggatcttacgcagcataaacatcataaagccgccgatggtttcgtagttgccgctctgcgggaactcgtcaatatccagcacgcgcatgacgtcgtcaattggggtgccgccgtcaatcagccaactgttctcatcacgggcgacaatctgctcttccagcccctgaccgaccagatcgcccatcagcgtggtcatcacgtcattgagggtgatgatccccaccaccagcgcgtactcgttcatgatcaccgcgaagtcttcacctgcggttttaaaactttccaacgcctcactaagggttaacgtatccggcacaatcagcgtgttgcgaatttgtacgccgctgttcagtgccaggctttggttagccagcacgcggttcagcaggtctttagaatcgacataaccgatgatgtggtcaatatcttcattacagacgaggaacttagagtgcggatgttccgccaccttattcttcaggctttgctcatcttcgtggagatcaaaccaaatcacgttttcacgcggtgtcatactagacggaacggtacgggattccagctcaaagacgttttcaatcagctcgtgttcctgtttacgtaacacgcccgccagcgcaccggcttccactaccgcgtagatgtcatcagaagtgatgtcatctttacgtaccattggcagtttgaaaatacggaagattatgttcgccaggccgttgaagaaccacaccagcggggtgcaaacgtacaggcagaagcgcatcgggttgatgatacgcaaagccacagcttctggcgcaatcataccgatgcgtttcggggttaaatccgcaaacaggataaacatgccagtcactaagctgaaagagagaataaagctcagttgctcagagagctctgcgctcatatagcgggagaacaggctgtgaaaagctggagaaaatgccgcatcaccgacgataccgccgagaatcgccactgcgttcagaccgatttggaccacggtaaagaacatgccgggattttcctgcatattcagaacgcgttgggcatttatattgccttcatcagccagcagtttaagtttgattttgcgactggcggcaaggctgatctcggacatgctgaagaacgcacttacagcgatcaagcagagtatgactaaaatactgtttaacatatcttatccgacctttcaggccagatcctcggaaggggaagttgattaatttgtgtgaaatacacattgaaagccgattcgaagaaagtgaaccggcattttcagtggctagtatagcgtaaggtactgtaaagccgccagagggttaaaattcagacagctgaaaaatgcaaaactgcctgatacgctatgccgatcaggcctacgcagtccttgcaatatattgaatttggacgattttgtaggcctggtaagtcgtttacgccgcatcaggcatagacaaagagcactttatcaacaaactacatttgtacccgtaacgttatgcttccggcggcagacagacgccaattccgccaattccacagtaaccatacgggtttttatgcagatattgctggtggtcatcttcggcataataaaacggtgtggcgttagcgatttccgtggtgatgtgacgatcgtcatcggcggcaagcatcgccgcctgaaaacgttccagactggcgcgagctgcggcatcctgttctggggtcagcggataaatcgcactacgatactgcgtgccgtggtcattgccctgacgcattccctgggcgggatcgtgattctcccaaaatacctgtagcaactgctcatagctgatgacggaaggatcgtaaacaatgcgtaccgcttcggcatgacccgtatcaccggagcacacttcccgataagtcggatttggcgtatagccgccggtatagcctgcggcggtgctgtaaacgccgggtaactgccagaacagacgctccacaccccagaaacaacccatcgcaaaaatggcaatctccattccgtcaggtacattggtcatactgtgaccgttgaccgcatgcagcgtggctacgggcatcggggtgttacgtccaggcagggcatcggcgggggaaaccagatgctttttatcaaataaactcatggtgtcgctctcccgaaaatcggtcattggggttaaggttgtaacaagaggcgtatttgcacacaataaccaccgtgaataggtctaaagtaaaacataagaaatatttggggtttagtctgctttttaatccatattactggatttttgttaagccgtttaacggcgttccaggggcaggaaaaaaggatattcaggagaaaatgtgcgctatatccgacagttatgctgtgtaagcttactctgcttaagcggatctgccgtcgccgcgaacgtccgtctacaggtcgaggggttaagcggacagctggaaaagaacgttcgtgcgcagctttctacgattgaaagtgatgaagtgacgccagaccgtcgctttcgcgcacgcgtcgatgatgccatccgcgaaggtctgaaagcgctgggttattaccagccgaccattgaatttgatctccgtccaccgccaaagaaagggcggcaggtattgatcgccaaagtcacgccaggcgtgccggtgttaattggcggcaccgatgtggtattgcgcggcggcgcgcggaccgataaagactatttgaaattgctcgatactcgcccggctattggcacggtactgaaccagggcgattatgaaaatttcaaaaagtccttaaccagcattgcgttgcgtaaaggttatttcgatagcgaatttaccaaagcgcagctgggcattgcgctcggcctgcataaagccttctgggatattgattataacagtggcgaacgttaccgctttgggcatgtgacctttgaaggaagtcaaatccgcgatgaatacctgcaaaatctggtgccgtttaaagagggcgatgagtacgaaagcaaagatctggcagaactgaaccgccgactttctgctaccggctggtttaacagcgtggtggtggctccacaatttgataaagcgcgcgaaacgaaagtattaccattgacgggcgtggttagcccgcgaacagaaaacaccatcgaaaccggggtcggttactctacggacgtgggaccgcgcgtgaaagcgacgtggaaaaagccgtggatgaactcttatggtcacagtctgaccaccagtactagtatttccgcgccggaacagaccctcgacttcagctataaaatgccgctgctgaagaatccactggaacaatattatttggtgcagggcggttttaagcgcactgacctgaacgataccgaatctgactccactacgctggtggcttctcgctactgggatctctccagcggctggcagcgtgccattaacctgcgctggagtctcgaccactttactcagggtgaaattaccaataccacgatgctgttttatcctggggtgatgattagccgcacgcgttctcgtggtggcctgatgccaacctggggcgacagccaacgctactctatcgactactccaacacggcctggggtagtgatgtcgatttctccgttttccaggcgcagaacgtctggatccgcacactgtacgatcgccatcgttttgttacacgcggcacgctgggctggattgaaaccggtgatttcgacaaagtaccgccggatctgcgtttcttcgccgggggcgaccgcagtattcgtggctacaaatacaaatctatcgctccgaaatacgccaacggtgacctgaaaggggccagcaagttgataaccggaagcctggaataccagtacaacgtgaccggaaaatggtggggcgcggtgtttgtcgatagtggcgaagcggtaagcgatattcgccgcagcgactttaaaaccggtaccggggtcggcgtgcgctgggaaagcccggtcgggccaatcaaactcgattttgccgtaccggtcgcggataaagacgaacacgggttacagttttacatcggtctggggccagaattatgagtttatggaaaaaaatcagcctcggcgtggttatcgttatcttactgttgctgggaagcgtggcgtttctggtgggcaccaccagcggcctgcatctggtatttaaagcggcggatcgctgggtgccaggactggatattggcaaggtcaccggcggctggcgcgatctcaccttgtctgacgttcgttatgagcagccaggcgtggcggtaaaagcgggcaatctgcatctggctgtcgggcttgagtgcctgtggaacagcagtgtttgtattaatgatctggcgctgaaagacattcaggtcaacatcgacagtaaaaaaatgcctccttctgaacaggttgaagaagaggaagatagcggtccgctggatctctccacgccgtatcccatcaccctgacacgggtggcactggacaacgtcaacattaagattgatgacaccacggtaagcgtgatggacttcacctccggcctgaactggcaggagaaaaccctgaccctgaaaccgacgagcctgaaaggcctgctgattgctctgccgaaagtggcggaagtggcgcaggaagaagtggtcgaaccgaaaattgaaaatccgcagccggatgaaaagccgctcggcgaaacgctgaaagatctcttttctcgcccggtattgccggaaatgaccgacgtgcatttgccgcttaacctgaacattgaagagtttaagggcgagcagctgcgcgtgacgggcgacacggacatcaccgtgagcaccatgctgctgaaagtgagcagcattgacggcaatactaaactggacgccctggatatcgattccagtcaagggatcgtcaacgccagcggcacggcgcagctgagtgacaactggccggtggacatcactctcaacagtacactgaacgtggagccgttgaaaggtgaaaaagtgaagctgaaaatgggcggcgcgctgcgcgaacagctggagattggcgttaatctttccggtccggtggatatggatttacgcgcccagacgcgactggcggaagccggattgccgctcaacgtggaagtgaacagcaaacagctttactggccgttcactggtgagaagcagtatcaggcggatgatctgaaactgaaacttaccggcaaaatgaccgattacacgctctctatgcgtacggcagtgaagggacaggagatcccgcccgcgactattaccctcgacgccaaaggtaatgaacagcaggtcaatctcgacaaactcaccgtcgcggcgctggaagggaaaactgaactcaaggcgttgctcgactggcaacaggccattagttggcgcggtgagctaacgcttaacggcattaacaccgccaaagagttcccggactggccgagcaaactcaatggcttgattaaaacccgcggtagcctgtacggcggcacctggcagatggacgtgccggagttgaagctgaccggtaacgttaaacagaacaaagtgaacgttgacggcacgctgaaaggcaacagttatatgcagtggatgatcccagggcttcatctggaactcgggccaaacagtgccgaagtgaaaggcgagctgggggtaaaagatctcaatcttgatgccaccatcaacgcgccggggctggataacgcgctgccggggcttggcggtacagcgaaagggctggtgaaagtacgcggcacggtggaagcgccacaactactggcagatatcaccgcgcgcggcctgcgctggcaggaactttccgtggcgcaggttcgcgtggaaggcgatatcaaatccaccgatcagatcgccgggaaactcgacgtacgcgttgagcaaattagccagccggatgtaaatatcaacctcgtcaccctgaatgccaaaggcagcgaaaagcagcacgagctacagttgcggattcagggggagcctgtctccgggcagcttaatctggcaggaagttttgatcgcaaagaagaacgctggaagggaactcttagcaatacccgcttccagacgccggttggcccgtggagcctgacccgcgatattgcgctggattaccgcaataaggagcaaaaaatcagcatcgggccacactgctggcttaacccgaatgcggaactgtgcgtgccgcaaactatcgatgcgggggccgaagggcgtgcggtggtgaatctcaaccgcttcgacctcgccatgctgaaaccgtttatgccagaaaccactcaggccagcggtatcttcacgggtaaagcggacgttgcctgggacaccacgaaagaggggctgccgcagggcagtatcacccttagcgggcgtaacgtgcaggtaacgcaaaccgtcaacgatgcggcgctgcccgtggcgtttcagacactgaatctgacggcggaattgcgtaacaaccgtgccgaattgggctggaccatccgcctgaccaataacggccagtttgatggacaggtgcaggtgaccgatccgcaaggccgccgtaatcttggtggcaacgtcaatatccgtaacttcaaccttgcgatgataaaccccatctttacccgtggggaaaaagcagcggggatggtgagtgccaacttgcgtctgggtggtgatgtgcaaagcccgcagttgtttggtcagcttcaggttacgggtgtggatatcgatggcaactttatgccgtttgatatgcaaccgagccagcttgcggtcaactttaacggtatgcgcagcacgcttgccggtacagtacggacccagcagggtgaaatctacctgaacggtgatgccgactggagccaaattgaaaactggcgggcgcgggtaacggcgaaaggcagtaaagtgcggatcaccgtgccgccgatggtacgaatggatgtaagcccagatgttgtattcgaggctacaccaaacctgtttaccctcgatggtcgcgtggatgtcccttgggcgcgcatcgtggtgcacgatctgccggaaagcgcagtaggcgtctccagcgatgtggtgatgcttaacgataacctgcaaccggaagagccgaaaacggcgagcattccgattaacagtaacctgattgtccacgttggcaacaatgtgcgcattgacgcctttggcctgaaagcgcggctgacgggcgatctcaatgtcgttcaggacaaacaagggctgggtctgaacgggcagatcaacatccctgaagggcgcttccatgcctatggtcaggatctgattgtgcgtaaaggtgagttactgttctctggtccgccagatcaaccgtatcttaatattgaagctattcgtaacccggatgctacagaagacgacgtaatcgccggagttcgcgtcactggtctggcggacgaaccgaaagcggagatcttctctgacccggcgatgagccaacaagctgccttgtcttatttgctacgtggacaagggctggagagcgatcagagcgacagtgcggcaatgaccagcatgctgattggtttgggggttgcgcaaagtggccagattgtgggtaaaatcggcgagacgtttggcgtaagcaatttagcgctcgacacccagggagtaggcgactcctcccaggtagtggtcagcggctatgtattgccaggtctgcaagtgaaatacggcgtgggtatatttgactctatagcaacactcacgttacgttatcgcctgatgcctaagctatatctggaagccgtgtctggtgtagaccaggcactggatttgctctatcagttcgagttttaacaatgcgaatatttgtctacggcagtttacgccacaaacaaggcaacagtcactggatgaccaatgcccagttactgggcgatttcagtatcgataactaccagttgtatagcctgggccactatccaggcgcagttccggggaacggaacggtacacggtgaagtttatcgtattgacaacgccacgctggccgaacttgatgccttgcgcaccaggggcggtgaatacgcgcgccagttgattcagacgccgtacgggagtgcatggatgtacgtttatcaacgacccgtcgatggattaaagctaattgaaagcggcgactggttagacagggataagtaaccatatgcatacgccaccttcgggtggcgttgttttttgcgagacgactcgcattctgttttgtaattccctcaccttttgcttttctctccgagccgctttccatatctattaacgcataaaaaactctgctggcattcacaaatgcgcaggggtaaaacgtttcctgtagcaccgtgagttatactttgtataacttaaggaggtgcagatgcgtattaccataaaaagatgggggaacagtgcaggtatggtcattcccaatatcgtaatgaaagaacttaacttacagccggggcagagcgtggaggcgcaagtgagcaacaatcaactgattctgacacccatctccaggcgctacagccttgatgaactgctggcacagtgtgacatgaacgccgcggaacttagcgagcaggatgtctggggtaaatccacccctgcgggtgacgaaatatggtaaagaaaagtgaatttgaacggggagacattgtgctggttggctttgatccagcaagcggccatgaacagcaaggtgctggtcgacctgcgcttgtgctctccgttcaagcctttaatcaactgggaatgacgctggtggcccccattacgcagggcggaaattttgcccgttatgccggatttagcgttcctttacattgcgaagaaggcgatgtgcacggcgtggtgctggtgaatcaggtgcggatgatggatctacacgcccggctggcaaagcgtattggtctggctgcggatgaggtggtggaagaggcgttattacgcttgcaggcggtggtggaataaggtgtgtttatttatcgcgggcataaaaaaacccttactaaccgaagcccggcgttcagggttattacgccagaagaacttatttattctttgcgcgctcgaaggaggcaacgatttcagctttagcggcttctgcgttttcccaaccttcaactttcacccacttgcctttttcgaggtctttgtagtgctcgaagaagtgagcgatttgcgctttcagcagttcaggcagatcgttaacgtctttaatgtgatcgtattctttgctcagcttgctgtgcggaaccgcaaccagtttcgcatcttcaccggcttcgtcggtcattttcagaacgccaaccggacggcaacggatcacagaacccggctgcagcgggtacggagttgggaccagtacgtcaaccgggtcaccgtccagagacagggtgtggttgatgtaaccgtagttgcatggatagaacatcgcggtggacatgaagcggtcaacgaacagtgcgccgctctctttgtcgatttcgtatttgatcggatctgcgttagccgggatctcaataacaacgtagatgtcttccggcagatctttacccgcagggacgttgagtaagctcatgtctgtttcctttaaaaatatgtggcaaacaagtgccgagtattatagccaactcgcgccgaatgtcttcgcttgttttcgtcttcattttcctttttcaccagttttaagacggtatacagagcaggaaaatccataaccgtagccgcatttttcatagtgagatgaaagcgattacaaacttgtgattaacgttttatttacttttttgaagtgtgatgtaacgcaatctgttacataacgaattgtctatagttttttcgcgaacatcttttaaccaataataactaccccgacgaggacaaccctatgtggaaacgcttacttatagtctctgcagtcagcgcagccatgagctctatggcgttggccgctccattaaccgttggatttagccaggtcggaagcgaaagtggctggcgtgccgcagaaaccaatgtggcgaaaagtgaagccgaaaagcgcggaatcacgttgaaaattgccgatggtcagcaaaagcaggaaaaccagattaaagcggtacgttccttcgttgcacaaggggtggatgcgatctttatcgctccggtggtcgcgacaggttgggaaccggtattaaaagaggcgaaagatgccgaaatcccggtattcttgctcgatcgttccattgatgtgaaagacaaatctctctatatgaccaccgtcactgccgacaacatcctcgaaggcaagttgattggtgactggctggtaaaagaagtgaatggcaaaccatgcaacgtggtggagctgcagggcaccgttggggccagcgtcgccattgaccgtaagaaaggctttgccgaagccattaagaatgcgccaaatatcaaaatcatccgcagccagagtggtgacttcacccgcagtaaaggcaaagaagtcatggagagctttatcaaagcggaaaacaacggcaaaaacatctgcatggtttacgcccataacgacgacatggtgattggtgcaattcaggcaattaaagaagcgggcctgaaaccgggcaaagatatcctcacgggttccattgacggtgtaccggacatctacaaagcgatgatggatggcgaagcgaacgccagtgttgaactgacgccgaatatggcaggtcccgccttcgacgcgctggagaaatacaaaaaagacggcaccatgcctgaaaagctgacgttaaccaaatccaccctttacctgcctgataccgcaaaagaagaattagagaagaagaaaaatatggggtattgagggttgctatgcctgatgccgattcgtaggccggataaggcgctcgcgccgcatccggcgatggtgcactgaagcctgatgcgacgcttaccgcgtcttatcatgcctactgggagcacgctttacaccgggggaaaccatgacgaccgaccaacaccaggagatcctccgcaccgaaggattaagtaaatttttccccggcgtcaaagcgttagacaacgttgatttcagcctgcgccgtggcgaaatcatggcgctgctcggtgaaaacggggcgggaaaaagtacgctaatcaaagcattaactggtgtataccacgccgatcgcggcaccatctggctggaaggccaggctatcagtccgaaaaataccgcccacgcgcaacaactcggcattggcaccgtctatcaggaagtcaacctgctacccaatatgagcgtcgctgataatctatttataggccgcgaacccaaacgcttcggccttctacgccgcaaagagatggaaaagcgcgccaccgaactgatggcatcttacggtttctccctcgacgtgcgcgaaccgctcaaccgctttagtgtcgcgatgcagcaaatcgtcgctatttgtcgggctatcgatctctctgccaaagtgctgatcctcgatgaacccaccgccagtctcgacacccaggaagtggagttactgtttgacctgatgcgtcagttgcgcgatcgcggcgtcagcctgatttttgtcactcactttctcgatcaggtctatcaggtcagcgatcggatcaccgtcttacgcaacggcagtttcgtaggctgtcgggaaacgtgcgagctaccgcagatcgaactggtaaaaatgatgctggggcgcgagctggatacccacgcgctacagcgtgccgggcgaacattgttgagcgacaaacccgttgccgcgttcaaaaattacggcaaaaaaggaacgatcgcaccgtttgatctcgaagtacgccccggcgagatcgtcggtctggctggattgctgggaagtggacgtaccgaaaccgccgaagtgatcttcggtatcaaacctgctgacagcggcacggcgttgatcaaaggcaaaccgcaaaacctgcgaagcccacatcaggctagcgtactgggcattggcttctgcccggaagacaggaaaaccgatggcatcatcgctgccgccagcgtgcgggaaaatatcatcctcgctctccaggcccagcgcggctggctacgtcccatttcccgcaaagaacagcaagagattgccgaacgctttatccgccagcttggcattcgcacacctagtactgaacaaccgattgaatttctctccggcggcaatcagcaaaaagtgttgcttagtcgttggctactgacccgaccgcaatttctgatcctcgatgagccaacccgcggcattgatgttggtgcccacgccgagatcatccgcctgattgaaacgctatgcgccgatggtctggcgctgctggtgatctcctccgaactggaagagctggtgggctatgccgatcgggtgattatcatgcgcgatcgcaaacaggtggcggagatcccgctggcagagctttccgttccggcgatcatgaacgccattgcggcgtaaggagaacagtgtgatgcctcaatctcttccggacaccactacgccaaaaaggcgctttcgctggccgacggggatgccgcagctggtagcactgttgctggtgctgctggtcgatagcctggtagccccgcatttctggcaggtggtgcttcaggatgggcgtttgttcggtagccccatagacattcttaaccgtgcagctcccgttgcgttactggcgattggcatgacgctggtgatcgccaccggtgggattgatctctccgtaggggcggtgatggctatcgccggagccacaacggctgcgatgacggtcgcgggattcagcctgccgattgttttgttaagcgccctgggcaccggcatcctggcgggattgtggaacggcatactggtagcgatcctcaaaattcagccgtttgtcgccactctgatcctgatggtcgccgggcgcggcgtggcgcaactgatcaccgccgggcagatcgtcacgtttaacagcccggatctcagttggttcggcagtggaagcctgttgttcctgccaacgccggtcattatcgcggtgctgacgcttatcctgttctggctgttgacccgcaaaacggcgctggggatgtttatcgaagccgttggtatcaacattcgggcggcaaaaaatgccggggtaaacacgcgaatcatcgtcatgctcacttatgtgttgagcgggctgtgtgcggcgattgcgggcattatcgtggcggcggatattcgcggtgccgatgccaacaacgctgggttatggctggagctggacgccattctcgcggtggtgattggcggcggaagcctgatgggcgggcgctttaacctgctacttagcgtggtgggggcgctgattattcaggggatgaacaccggaattttgcttagcggctttccgccagagatgaaccaggtggtgaaagcggtggtggtgctttgcgtgctgattgttcagagccaacgctttatcagtctgattaaaggagtacgtagccgtgataaaacgtaatttgccactgatgatcaccatcggcgtctttgtgttgggttatctttactgcctgacccagtttcccggttttgcttccacaagagtgatctgcaatatcctgaccgataatgcctttcttgggatcattgccgttggcatgacctttgtgatcctcagtggtgggatcgatctctccgtcggtagcgtgatcgcctttactggcgtgtttctggcaaaagtgattggcgatttcggcctcagcccgctgctggcgtttccgctagtgctggtgatgggctgtgccttcggcgcatttatggggcttctgatcgacgccctgaagatcccggcatttatcattacgcttgcggggatgttctttttgcgcggcgtcagctatctcgttagcgaagagagcattccgataaaccatcccatttatgacacgctcagtagccttgcgtggaaaatccctggcggcggtcgcttaagtgcgatgggactgctgatgttggcggtggtggttatcggcatattcctcgcgcatcgtacccgttttggtaatcaggtatacgccattggcggcaacgcaacgagcgcgaatctgatggggatttccactcgcagcaccactattcgcatttatatgctctccaccggactggcaacgctggcggggattgtcttcagcatttatacccaggccggatatgcgctggcgggcgtaggtgtggaactggatgctatcgccagtgtggtaattggcggtacgcttttgagcggtggcgttggaacggtattagggacgctttttggcgtggcgattcagggactgattcagacttacataaactttgatggcacgctgagttcctggtggacgaaaatcgccatcggtattttgttgtttatttttatagcattacagcgtggattaacggtgctgtgggagaatcgtcagagtagcccagtgacaagagtcaacattgcgcagcaataaaaacgcctctccgtgtggagaggcgcaggagattacgcgtccgggaactcacggataaagcgttcgacatcttcaaccatatggtcgttgccgacaaagaaactacggcgctggtgcagggtttccgggatgatatccagaatacgctctttgccatcgctcgctttaccgcccgcttgttccgccaggaatgccatcgggttgcactcatacagcaaacgcagtttgccgtccgggtggctggcggtgcttgggtagagataaataccgcctttcagcaggttacggtggaaatccgcgaccagactaccgatataacgactggtataagggcggttggtggatttatcttcttcctggcagaatttaatgtacttcttcaccccgttcggaaacttaatgtagtttccttcgttgatggagtaggttttgcctttctccgggaagcgcatccgttcctggcacaggcagaaaacgccgaggctaggatcgtaagtaaaggcgtgaacaccgcatccggtggtgtaaaccagcatggtagaggagccgtataccacgtaacctgccgcaacctgtttgttaccaggctggaggaaatcttcttccgttaccggcgtgccaacaggcgtaacgcggcggtagatggagaaaatggtaccgacagagacgttaacatcgatgttggagctgccatccagggggtccatcagcaccacgtattttgcgtgttcacagccttcaaagacgacaatctcatcttcttcttcagaggcaatgcccgcaacgatatcgcgtgctttcagtgcggctttcagtttttcattagcgaacaagtcgagtttctgctgaacctcgccctgcacgttctcagcaccgctggcacccaggatatcaaccagtcctgctttgttgatatcgcgatggataatcttggcgcccagttttattgcgctcagcaaagcagtgagctcaccggtagcatgagaaaactcgtgctgcttttcgacaataaattcacctaacgttttcataaaactttccctgcaatgtttatggagtaaagcgaccgcaacaatcttaacaaataatctcaatgttgcgctcaggtgaatcgcgccagcaaattacggattatcctgaaatgcgtttctcacttgcccgacatatgcgtaaaatgagcggcagattaaaaaaggatagtgacgtatgcgcattcatattttaggaatttgtggcacatttatgggcggtctggcgatgctggcgcgccagttaggccatgaagtaacgggtagcgacgccaatgtgtatccgccgatgagcaccttacttgagaagcaaggcattgagctgattcaggggtacgatgccagccagctcgagccgcagccggatctggtgattattggcaacgccatgacccgtggaaatccgtgtgtggaagcggtactggaaaaaaatatcccttatatgagtggtccacagtggctgcacgattttgtgctgcgcgaccgctgggtgctggccgttgccggtacacacggcaaaaccaccaccgcgggaatggcgacctggattctggaacagtgtggttacaaaccgggctttgtaatcggcggtgtgccggggaactttgaggttagcgctcatctgggcgaaagcgacttctttgttatcgaagcggatgagtatgactgcgccttcttcgacaaacgctctaaatttgttcattactgcccgcgtacgctgatcctcaacaaccttgagttcgatcacgccgatatctttgacgacctgaaagcgatccagaaacagttccaccatctggtgcgtatcgttccggggcagggccgtattatctggccggaaaatgacatcaacctgaaacagaccatggcgatgggctgctggagcgagcaggagctggtgggtgagcagggtcactggcaggcgaaaaagctgaccaccgatgcttccgaatgggaagttttgctggatggcgaaaaagtgggcgaagtgaaatggagcctggtaggcgaacataatatgcacaatggcctgatggcgattgcagcggctcgccatgttggtgtagcgccggcagatgccgctaacgcgctgggtagctttattaatgctcgtcgccgtctggagttgcgtggtgaagcgaatggcgtcacggtatatgacgattttgcccatcacccgacggcgattctggcaacgctggcggcgctgcgtggcaaagttggtggtacggcgcgcattattgctgtgctggagccgcgcagcaataccatgaaaatggggatctgcaaagacgatctggcacctagtttaggtcgtgccgatgaagtcttcctgctgcaaccggcgcatattccgtggcaggtggcagaagtggcagaagcctgcgttcagcctgcacactggagtggcgatgtggatacgctggcagatatggtggtgaaaaccgctcagcctggcgaccatattctggtgatgagcaacggcggttttggtgggatccatcagaaactgctggatgggctggcgaagaaggcggaagccgcgcagtaattcggccttagccagatatagtatgcgtaggccggataaggcgttcacgccgcatccggcatttgagcatagtgcctgatgcgacgcttgatgcgtcttatcaggcctacaggtgcaccgtatccggcaaaccatactcacatcaacaacgaaaattacccttcgttctccgctaactcgcgcagatactggaaaatctggcgtgcggatttcggcggcttattcccttctttctctttcttcgcgttgcggatcagagtacgcagttgctgacgatcggcatcgggccacagatttaatacctcagcgatggcgtcatcaccttgatcgatcagacgatcgcgcaggttttccagtttatggaacagcaccacctgctggttgtgacggtttttcagcttatccagcgcctgacgaataggctctacgtcgcgctggcgcagcatcttaccgatgagctgcaactggcggcggcgaccttccatcttaatacgctgggcgagctcaatagccgcgcgcagatccgcatctaacgggatcttatccagcgcgtttttccccagatcaacaatttccgcgccaaggcgttttagctcctcggcatcacgtttaatttcacttttactgacccagataatttcatcgtcttcgtcttcgatgtcatcaccgggaacgtcgtcgagccagtcttcgggctgcttagtcatctcaggctccttaaaaaaagaggctaatgttaccagttaagatgcgcactgaaaaacggttctctgttagacttcagagaaactctctacattatggcacttgcaatgaaagtaatctctcaagttgaagcgcagcgcaagattctggaagaagcagtttccactgcgctggagttggccagtggcaaaagcgacggtgcggaagttgccgtcagcaagaccaccggcattagcgtaagcacgcgttatggtgaagtggagaatgttgaattcaatagcgatggcgcgctggggatcactgtttatcaccagaaccgcaaaggtagcgcaagttccaccgatttaagcccgcaggccattgcccgtactgtacaggcggcgctggatattgcccgttataccagcccagatccctgtgccggcgtggcagacaaagagctgctggcctttgacgcaccagatctcgacttgttccaccctgcggaagtttccccggatgaagccattgaactggcggcccgcgcagaacaggcggcattgcaggcggacaaacgcatcaccaataccgaaggtggcagctttaacagccactacggtgtcaaagtttttggcaacagccacggcatgttgcagggttactgcagtacgcgtcatagcctctccagctgtgtaattgccgaagaaaatggcgatatggagcgtgattacgcctacaccattggtcgtgcgatgagcgatctgcaaacgccagagtgggttggggccgactgtgctcgccgtactttaagccgtctgagtccgcgtaaactctccaccatgaaagcgccagtcatttttgccaatgaagtggcaaccgggctttttgggcatctggtgggggcgatagcgggtggaagcgtttatcgtaaatctaccttcctgctggatagcctgggtaaacaaattctgccggactggctgaccattgaagagcatccgcatctgctgaaagggctggcgagcacgccattcgacagcgaaggtgtgcgcaccgagcgtcgcgatattattaaagatggcatcctgactcagtggctgctgaccagctacagcgcgcggaaactggggctgaaaagcaccggacatgcgggcggtattcacaactggcggattgccggacaaggtctaagcttcgagcagatgctcaaagagatgggcaccgggctggtggtgacggaattgatgggccagggcgtgagtgccattaccggtgattattcccgtggtgcagcgggcttctgggtagagaatggcgaaattcagtatccggtgagcgaaatcaccatcgcaggtaatttaaaagatatgtggcgcaatattgtcaccgtcggtaacgatattgaaacacgcagtaatatacagtgtggttctgtgctgttgccggagatgaaaatcgccggacagtaaaaaaactggcgcgacctgccgcgctataaactaaaaaattacacaaaatcattcgcactgcatcgagacggaaagtgaatgagggccggggagcgtactcgcagtacgtgacccggtcgaatgagcgtagtcgtcgatgaggcagtgtgaaggatgaagtgtaaataaaaaaggaactattcttgcagtctcctcgttggtattcagttcggcgtcatttgctgctgatctcgaagacaatatggaaaccctcaacgacaatttaaaagtggtcgaaaaagccgataacgcggcgcaagtcaaagacgcgttaacgaagatgcgcgccgcagcgctggatgcgcaaaaagcaacgccgccgaagctcgaagataaaagtccggacagcccggaaatgaaagatttccgccacggtttcgacattctggtcggtcagattgacgacgcgctgaagctggcaaatgaaggtaaagtaaaagaagcgcaggctgctgcagagcaactgaaaacgacccgcaatagttatcacaagaagtatcgttaattcctcatttccctgttgcctgcactcaggtaacagggaacttatcatcgcaaatgatgcaccacctgattgctgctgccgcgccagatcagggaagggtcttttaaatcctgcacaaatttgccgtcgaccagcacgttaatcaaatcaacaacctgcatttgcgcagcgttgagttcgtcgagtttatagcctgtccacacccagatgtctttacccggacactcggcgcggatgcgttgtaccagtttcagaatatccggcacgttttgcggatgcagcggatcgccgccggagagggaaataccctggcgtttgatacgagtgtcattcagatcgttaatgatctggtcttccattgctttggtaaatggctgaccggaatttacccgccatgtgcttttgttatagcaaccggggcattcatgaacacacccggagacaaacagggtgcaacgagtgccggggccgttgacgatgtcgacaggatagtactgatgataattcattatttcgcctggcttatcagtccgcgtgtaggctgcatccggtaatcaatgcctgatgcgacgctgtcgcgtcttatcagacctggagcaattgccaaatgtaggccggataaggcgtttacgccgcatccggcatttgcttagctcagagtgaagattaacctatctgcccattccccaaatgtttaacgcggcgcttaacttcttcctgcttaccagcgttaaacggacgtgcatccgggctacctaaatatccgcacacgcggcgagttacgctcacacgggaggcgtcatggttaccacatttcgggcaagtgaagcctttgctggtgcactcgaactcaccggtaaagccacactcgtagcactcatcaatcggtgtattggtgccgtaatacggtacatgctgatagctgtaatcccagacatcttccagcgccttcaggttgtgctgaatgtttggatactcgccgtagcaaatgaaaccaccgttcgccagcggcgggtaaggcgcttcaaagtcgatcttgtcgtacgggttcaccttcttctccacatcgaggtggaaactgttggtgtagtaacctttatcggtcacgcccggcaccacgccaaactcagcagtatcgagacggcagaagcgatcgcacaggttttcactcggcgtgctgtagagactgaaaccataacccgtttcttctttccactgatccactgcctgacgcagacgttcaacaatggcgatacctttcgcgcgaagctgctcgttgtcgtaaacatgctcgccgccgaacagcgcgttaatggtttcgtggatgccgatgtaacccaggctaatagacgcacgaccgtttttgaagatttcagaaacatcatcgtcagcattgagacgcacgccacaagcaccttccatatagaggatcggggccacgcgcgctttcacgccttcgagacgagcgatacgggtcatcagcgccttacgtgccagcaccagacgttcatccagcagcttccagaaggtggcttcatcgccttttgcttccagagcaatacgcggcaggttcaggctgatcacgccgaggttgttacgaccatcgtggatctgctcgccgttttcattttcccacacgccgaggaagctgcggcagcccatcggagttttaaagctaccggtgactttcactacctgatcgtagttcaggatatccggatacatgcgcttgcttgcgcactccagcgccagctgtttgatgtcgtagttcggatcgccttttttatggttcaggccatcgcgaatcgcaaacaccagtttcgggaacaccgcagttttacggtttttaccgaggcctgcgatacggttacgcaggatgctttcctgaatcaggcggctttcccagctggtgcccaggccaaaaccaaaggttacaaacggcgtctgaccgttggcggtgtgcagggtgtttacttcgtactccagactctggaaggcatcgtagcactctttgatggttcgagagttagcgtagccttcggcgtccgggatgttccactcttctgcggtcttgcgatgtttgttgtagctggcagtgacaaacggtgccagcacttcatcgatacggttaatggtggtgccgccataaatatggctggcaacctgagcaataatctgcgcagttaccgcggttgccgtagagatgctcttcggcggttcaatctcggcgttccccattttaaagccctgggtcagcatgcctttcaggtcgatcaacatgcagttgaacatcgggaagaacggactgtaatcgagatcgtgatagtgaatatcgccacgctcatgtgcctgcaccacgtcacgcggcagcaggtgctgacgtgcatagtgtttagccacgatcccggccagcaggtcgcgctgggttggaatcaccttgctgtctttgttggcgttttcgttgagtaagctggcgttggtctgctcgaccagaccacggatctcctggttcaggcgaccgcgtttttcacgttcaatgtcgcgatcgtgacggtactcgatgtaagcacgagccagttgtttgtatggaccactcatcagctgattttcaactgcggtctggatctcattgatatccacctggttgcggccctgcatctgctcgctgacaaccgcggcaacagtggcgcaataatcggcatcatcgacttccgctgctttagctgcacgcagaatcgcttctttgatgcgctcacttttaaacggcactttgcagccgtctcgtttcatcacatgcggtgtcatgatcgctccatatttttaagaacaggttatccacagaaattgggaaaggcgttttccggttttttcgtttcgttttccggtgctttccgcaatcgccatccgcttatccacaacgccgcacctttttcgtggggagctgtagtagcaattatagtcgattaatacaacatattgggttgggacgcattttaaagtctatatatagtgctttgcatcaaggatgtttgagctttttttgatgtagctcaaagtaaaaagcagagcgtacggatgacgggcgctacagcgatatgtaaattttttaatgaatttgctggttgaaaaatcaacaaaaacaacatactgacagacaaaaccccggaatgaccggcattaccggggcttagggaagatttacttctgtaaccaccagacagcctcaaaaggccgtaaattcatggcacagggttgtggactggcttcttcgtagttatgcatcacaagctgccagttgccgcgcatttgccctgcctgccagggttggatctcacggctaaggttggcaatgaccagcaaggtttgccccttccattcacggcgatagcaccacaatacagggctgtttggcagcagatcctggtaattgccccatgtcaggatggcttcctgcttacgcagtgcgattaacttttggtaggtgtaaaacacgctggaatcatcggccagcgcggcttctacgttgatttgttgatagttatcgcccaggccaatccacggttcgccagccgtaaacccggcattatcgccgttgctccattgcatgggcgtgcgactgttgtcacgggatttactggcgaggattgccaataactcgtcggcatcacgcccatcgttgcgcagctcggcaaacatattgaggctctctacgtcgcgatagtcagtaatgcgcgtgaaatgcgggttggtcatgccaatctcttcgccctggtagatatacggcgttccctgcatgccatgcagcaccatcgccagcatttttgccgcaggcacgcggtattcaccttcatcaccaaagcgagaaacaatgcgcggctgatcgtggttacaccagaacaaggcattccatgctacgttgtgcattccttgttgccagtggcggaacaatgttttcaacgccacaaagtcaggtttagccagcgtccatttttcaccaccgggataatcgaccttcaggtgatgaaaattaaaggtcatgctcaattcactgcctgtcagagccgcgtatcgctggcaatgctcaaggctggtggaggacatttcacctacggtcattaacccgcgtggcgtaaacacatcgcggttcatctcgtgcaaaaactcgtgtgctcgtggcccgtcggtgtagaagcgacgcccgtcgccgtccaggtcttcagggaaacgcgggtctttggagatcagattcaccacatccaggcgcaacccgtcgaccccacgatcggcccagaactcacagacttttttcagctctgcgcgtaccgctggattctcccagttgagatccgcctgttctggtgcaaagagatgcaaatagtactgttcgctttccgcatgccagcgccacgcactaccgccaaatttactacgccagttgttcggtggcgtttctggttctccatcgcgccagatataaaactggcggtaagggctttctttgttcagcgcctcgcgaaaccaggcatgttgggtagaggtatggttaaacaccatatcgagaatgatacgaatcccgcggctttttgcctgcgtcaccagttcgtcaaaatcgtccagcgtgccgtaggtgggatcaatcgccgtatagttcgctacgtcgtaaccgttatcgacctggggagagacataaaagggggttagccagatggcatcaacgcccagtttatgcagatagtccaggtgttggataacgccacgtaaatcgccggtaccgctacccgtggtgtcctgaaaactctttggataaatctggtagataacgccgttttgccaccagtggggaagatgagtcattacgttattcctgcgaatgcgagggggcgcaattgcgccccgaagaaaattaaacaatgtccagcgtgcccaggcggtatttccgctgatagataaagctggtgagtacaatcgggatgatgatggcgatagccattgccagcgcaaacacctgccagtagctcggttgaatgctgagaattcccggcaggccgcctacgccgatgccattcgccataacgccgttcaggccgcatagcaatcctgccagaccagaaccaatcatcgcgcacagcatcgggaagcgatatttcaggttgatgccgtacattgcaggctcagtgaccccaagccaggcggagatagcggcaggcacggagatctcgcgttcattgtgcttgcggctggaaatgataatgcctatcacggcggagccctgagcgatattgctcagcgcaatcagcggccacactggcgtaccacccatgctttgaatcatctgcaaatcaatagcaagcgtggtctggtgtacaccggtgatcaccagcggggcgtacaggaagccaaacaatgctgcgccaatcggagcaaagctgccggtcatcaggtgacgtaccgcaaaggcaacgccatcgccaatcatgcgaccaaacggaccaatcagcgcatgggcgaggaacaccgcgaggatcaggctacagacgggtaccaccaccagatagaggtaatccggcacgatgcgtttaaggcgagtttcaataacgcccagcgccagtccggctaacagtgccgggatcacctgcgcctgatagcctactttggcgatgctgaacatgccaaagtcccacacttccggcagctgctgcccgagcagataagcgttcatcagctgtggagaaaccagtgtcacgccaagcacgataccaaggatcggcgtgccgcccatttttttcaccgcactccagcaaataccgaccggcaggtagaagaagatcgcttcaccgatcaaccacagaaaatcgtagatcgtttgcagggaagggtacatttgcgccagcgtctgaccgttgctcatgggcaaatcgccgatcacattgcgaaaaccgaggatcaaaccgccgctaatcaacgcgggcagcaacgggaagaagatcaccgcgaaatgagagatcaactgctcatgccatttcatattatgccgggcggctttttttacctgctctttatcaacctgcgcctgtccggtactcgcaatcagtgcttgatagtaatcacccacgttggtgccaatcaccacctgaaattgcccggcattggtgaaacagcctttcaccatagggagttgctcaatttctttcggtctggcattggccggttggttgaggacaaagcgtaggcgagtaatacagtggctcaccgtcgcaatattgccgcgcccgccgaccagttcaatcaaccgatcgatatccgtttggtttattttgctcatcataaagccccatggcagatgacatttttggttggctgcagaatatattgcgcggaaaaatttaaaaacgggaacgttcccgaaacgcagcgaagatcacaatttatcgttcaggaaacgatcaggacagggtggcggggatgatgatttgttgcggttcgctgcgcccggttacctgcgcgatcaactggcaagccgcctggcgtccagcttcggcgtaaccgggatctacggttacgatctccggatggaggaatttcattaacggcgtattaccgacgctcgccagttgcaaggtgtcgatgcgttgctcttgcaggtatttacttgcgccaagtgccagcgtgtcggttgcgcacagtaaggcggtagtttcaggcgtaatcacttttgcaacgttctcatagccttgcttcatagcaagccctggcagggcggcaacgggatgcagtttatgcgctttgcagaacgccaggtaggcttcgtgacgtcgcttaccggttgtcacgtcactgtgcggcacgccgagataactgatattacgatgcccctggtcatacagccgttgcatcaggattttgattgccccttcgtcgtcataacagacgctagcaaagccttttgcgtcacgcgccagcagaaccaggctactctgccagtgggctaacatttcttctgttatgccagtaaaaccgaacagcactacgccgtcgatattacgccgtttcagcactcccaaatgttcggcaactaattgcggggaaaactgactttccatcatgattgggtcgtaaccttgttcatagaacgctggcagcatggtttgaacggcgagattttcactcaagctatccagacgggtaacaatgatggcgaccactttatcgctttgcccacgcatagcgcgcgcagagcgggaaggggaaaatccatgctgattcatcactgcttcaacacgctcgcgggtgagctggctcacgccgctttcgttattcagcacccgggaaactgtagatttccccacgccgcttaagcgcgcgatatctttgatggtcagccgattttgcatcctgttgtcctgtaacgtgttgtttaattatttgagcctaacgttacccgtgcattcagcaatgggtaaagtctggtttatcgttggtttagttgtcagcaggtattatatcgccatagatgctacgaatattattggattctccttattatttgcggcgcttttttcacttaccggaggttatatggaacctgatcccacgcctctccctcgacggagattaaaacttttccggtaagcccgtcttttcacggcgttaccggatgcgtaaggccgtgacgttttaacgtccctgctcagctttattaccttcaggtaaggcttcgccacgcctgaagacatttctgtactgtttcagacagtgcggagggactccttatgtttaaagaaatttttacccggctcattcgccatttaccttcccgtctggttcatcgtgatccattgcctggcgcgcagcagacagtgaatacggtggtcccgccgtccttaagtgcgcattgcctgaaaatggcggtgatgcccgaagaagaattgtggaaaacgttcgacacccatccggaagggttaaatcaggcggaagtggaatctgcccgcgaacaacatggtgaaaataaattacccgcacaacaaccgagcccgtggtgggtacatttatgggtctgctatcgcaacccctttaatattttactcaccattctcggcgctatttcttacgccacggaagatttatttgctgcgggcgttatcgcgctaatggtcgctatttctacgttgctgaactttattcaggaagcacgttccactaaagcggcagatgccctgaaagcgatggtcagcaatactgcgacggtgctgcgcgtaattaacgacaaaggcgaaaatggctggctggagatcccgatcgaccagctggtgcccggcgatattataaaactggcggcgggagatatgatcccggcagatttacgtatcttgcaggcgcgggatctgttcgtcgctcaggcgagcttaaccggtgagtctctgcccgtagaaaaagccgctaccactcgccagccggagcacagcaatccgctggagtgcgacacgctgtgttttatgggcaccaccgtggtgagcggcacggcacaagcaatggtgattgctacaggtgccaatacctggtttggtcaactggcggggcgtgttagtgagcaggaaagcgagccgaatgcctttcagcaagggatcagccgcgtcagtatgctgctgattcgctttatgctggtgatggcaccggtggtgctgttaatcaatggttacaccaaaggcgactggtgggaagcggcgctgtttgcgcttagcgtcgcggtaggcctaacgccggaaatgttgccgatgattgttaccagcacgctggcgcgcggcgcagtaaagctgagcaaacagaaagtgatcgtcaaacatctggatgctattcagaactttggcgcaatggatattctgtgcactgataaaaccggcaccctgacgcaggataaaattgtgctggagaatcataccgatatctccggtaaaaccagcgaacgcgtgctgcatagcgcgtggttgaacagtcattatcagaccggacttaaaaacctgctcgatacagcggtgctcgaaggtacggatgaagagagtgcgcgcagcctggccagtcgttggcaaaaaattgatgagattccgtttgatttcgagcgtcgccggatgagcgtggtagtggcagaaaataccgagcaccatcagctggtttgcaaaggtgcattgcaggaaatcctcaatgtgtgtagccaggtgcgtcacaatggcgagattgtgccgctcgatgacatcatgctgcgtaagattaagcgggttactgatacgctgaatcgtcaggggctgcgcgtggttgcggtggcgacgaaatacctgccagcgcgtgaaggagattaccagcgggcggatgaatccgacctgatcctcgaaggatatattgcttttcttgatccgccaaaagagacaaccgctccggcactgaaggcattaaaagcgagtggaattaccgtaaaaatccttactggcgacagtgagttagttgcagcgaaagtgtgccatgaagtggggctggacgcgggagaggtggtcattggtagtgatattgaaacgctatctgacgacgaactggcaaatcttgcacagcgtaccacgctgtttgcccgcctgacgccgatgcataaagaacgcattgtgaccttactgaagcgcgaagggcatgtggttggctttatgggcgatggtattaatgatgcgcccgccttacgcgctgcggatatcggcatttctgtggacggcgcggtagatattgcccgtgaagcggctgatatcatcctgctggaaaaaagcctgatggtgctggaagagggggttattgagggacgtcgcactttcgccaacatgctgaaatacatcaaaatgacggcgagctctaacttcggtaatgtgttcagcgtgctggtagcgagtgctttcttgcccttcctgccgatgttgccgttacacttgcttattcagaacctgctgtacgatgtgagtcaggtggcgatcccgtttgataacgtcgacgacgagcaaattcaaaagccgcagcgttggaatccggcggatctggggcgctttatgatcttcttcggaccgatcagcagcatcttcgatattttgacgttttgcctgatgtggtgggtattccatgccaacacgccggaaacgcaaacgctgttccagagcggatggtttgtggtgggcttactgagccaaacgctgattgtgcatatgatccgcacccgccgtgtgccgtttattcagagctgtgcaagctggccgttaatgatcatgaccgtgatcgtgatgattgtcgggatcgcattgccgtttagtccgctggccagttatctgcaattacaggcgctgccgttaagctatttcccgtggctggttgcgattctggcagggtatatgacattaacccagttggtgaaagggttctatagccgtcgttacggctggcaataaagaataaactgggcacgatagccccgattcagattgtagacaaagtgagttttgttcatgccggatgcggcgtaaatgccttatccggccaacaaattcaataaattgcaggaatcacgtaggcctgataagcgtagcgcatcaggcgattttgcgtttgtcatcagacttaatccgggcatgatagcccggatttccatcaagattagcgacgaacagcgatcgcttcgatctcaatcttcacgtctttcggcagacgggcaacttcaacgcaagaacgtgccgggaaggtggcgttgtgttcggtgaagaaggcttcgtaagtggcgtttacggttgcgaagtcgttcagatcttttacaaacacggtagttttaacgatgtcgcccactttcaggccagcggcttcgacgatcgcttttacgttatccaggctctgacgtgcctgtgcagcgacgtctgccggtacttcgcccgttttcggatttaccgggatctgaccggaggtgatgatcatattgcccagatcaacgccctgtacgtaaggaccgatagctgccggtgcattttccgtcgcgatagttttgctcatgatttctcctttattacagcggtaaaaagtctggctcattatagggagccagacttttattaccaaccgcaattaattggccagcaccacattatgggaaaactctttttcacagtatttgcatttgagcgcgatatcattggcgcgttttcgcacggcaaagctggaactaaccggttcggcatggctgatacagttgctgttcgggcagaccagcacattgtcgatgcgctccggcagacttgggcggcttttacccaccacttcatagttgtcgatacggttaaccgtggcttgcggcgcatacaatgccagttgatctacttgatcttcactcaaaaaggtattttcgattttgatcagatctttgcggcccatctcgccagaaggcaggttcagaccaatggtgatgcgctgatccgtttcggtcagcttgaacagactcaacagcttaaaaccgatctgggcggggatatggtcaattaccgtgccgcgtttaatagcttcaacctgcaatttattatcgtgtgtcatctctatttccccttacagtaccagatcgcgattcagaaccagtgccagtaacgcctggcgagcgaaaatcccgttgcctgcctgctggaagtaccaggcgtgtggcgttttatcaacatccgtcgcaatctcatcaacacgcggcagcggatgcagcactttcatattggctttggcgttgtggagatcgctggcgcgaagaacaaactgcgctttcacgttggcgtactcggacgggtccagacgctctttttgcacgcgggtcatgtacaggatgtctacttccgccatcacttcttcaatagagctgtgcagactccatgcgatccctttttcatcgagcatatccagaatgtattgcggcattgccagcgcgtccggcgcgatgaagtaaaaacggttgccgtcgaacttcgctaacgcctgagtcagggagtgaacggtgcggccatatttcaggtcaccaaccattgcgacgtggagattgtccagacgcccctgggtttcctgaatagtgaataagtccagcaaggtttgcgtcggatgttggttggagccatcaccggcattcagtaccggtacattgccggaaaactcggtggccaggcgcgccgcaccttcctgcggatgacgcatcactatcgcatcgacgtaagtgctgataacgctaatggtatcggccagcgtttcgccctttttacccagacttgtattggcgctgtcggagaagcccaccacgctggcccccaggcggtgcatagatgtttcgaaagagaggcgggtacgggtagaggcttcgaagaaacagctggcaatgactttgtgcttcaacagctctggttgcgggtttgctttcagtttcgccgctgtcgccagcaccagattaaggtcatcgcgactaaggtcgtttatggaaatgatatgtttctgatatagcggattagccatcttttatctcctgacgcctgggcaaaaaaaagcccctcgattgaggggctgggaatgggtgatcaacgggaagaaaaacggcaggccagcgtcttttttcagacgcggtaagacaaaatgtcgaacacactgaaccatacatcctcccggcaaattgtccggcattatactcatcgtcagaagcggcgcaagcatttgatgcaatattttgtcagcgcaaacggtttatttgaattaaaagtcaaggtatatgcatttttatttgatgtgattctgcaggggaactgtccttcggtatcaataattgcagacattccctgctttttcctttttcactttcacgcaatcagatatgcattttattccattcatccgacttatagggcggagtgtgaaagcgaacggctaacactattgcttactgctcagggatgcgcgctatcactttaatttcaaaatcaaagcctgccagccatgtaacacccaccgccgtccagtttggataaggtggggcgctaaatatttcatttttcaccgtcatgatgtcttcaaattggttttctggatcggtatggaagctcgtaacatcaatgatatcgtcaaaagtgcatcccgcagctgccagggtcgcatgcaaattatcaaatgccagtctgacttgttgctgaaaatcgggttctggtgttccgtcctctcgacttcctacttgcccggaaacaaacagcaaatcgccggaacgaatagccgcagaataacgatgctcagcatatagactatgtcggccagcagggaaaacagcggttctttctaccatttggttatcctcaagatttacgacatgaacagaagatttctctttaccgggagccgcttttagcggacgacgtgagtaaacaaaacccagacatcatggataatggctgggcttaattgagcgtagtcggttatgcgccaaacgcgccatcaatggtatgcatcgcgccggtaacaaaactggcttctggccctgctaaccatgcgaccataccagcgacctcttccggttgcccatgtcttttgatagccatcaaactatgcaacatatcgcgcattggcccgttggcgggattagcgtcggtatcaattggccctggctggacgacgttaatggtgatcccacgcggtccaaaatcacgggccagcccgcgcgccatgccttgcagggcagatttgctggcggcataagcagccatgcctgcaacaggcatacgatcgccattcacggagccgatgattaagatgcgcccgccttcgggcatctgccgggcggcttcaacagaggcatgataaggagcatgaatattgattttgaaaaggcgatcaatatcgtcggcatttaattccagggcctcgccaaagacgccaatacctgcatttaccaccaggatatccaatgcgccgctcttacgaacgacatcaatgacagcgtctctgtcagcactatctgtgaatactgctgtcgctccagtctcttgtgccaggcgtttagcggcatctttgctccccgcataggtgaatcgtacattggccccatcggtgacgaaacgacgtacgatagcggcaccgataccacgactgccaccgaggatgagaactgtcttacctgtaaaagcgcccataaggactccttgatttattatgtaacatgcattacaaaactgttttaactttctgtcaacaggttttgtaatggtcactaaaaaacaatctcgcgttccaggtcgtcccagacgtttcgctcctgagcaggcaatctctgcggcaaaagtgctttttcaccaaaaaggtttcgatgctgtcagtgttgctgaagttactgattatcttggtattaaccccccgagcctctacgcggcttttggcagtaaagctgggttatttagccgtgtactcaatgaatacgtcggtacggaagctattccgcttgccgatattcttcgtgatgatcgtccggtaggcgagtgcctggttgaggtattaaaagaagcggcgcgcagatatagccaaaacggcggctgcgctggctgtatggttcttgaaggtattcatagtcatgatccacaagcgcgtgatattgccgttcaatattatcacgccgcagaaacgaccatttatgactacatcgccaggcggcatccacaacgcgcacaatgtgtgactgattttatgagtaccgtgatgtctgggctttctgcgaaggcacgagaggggcactctatagaacaactctgtgcaacagctgcaatggcgggggaagcgataaaaactattcttgaggagtgatgcgggccttgacccgaaaggcgggaaagcgcctgccgataagttgtgataagacaataattcacgcgttaaggctagcggaattgattatcttttcgtataacgatagaaatgaaacgttgttttaattaaggagtggaaaagatgatcatcggaaatattcataatcttcagccgtggctaccccaggagttacgccaggcgattgagcatatcaaagcacacgttacggcagaaacgccaaagggcaagcacgatatcgaaggcaatcgactgttttatcttatcagcgaagatatgaccgagccgtacgaagctcgccgtgcggagtaccatgcccgctatcttgacattcagattgtgttaaaaggtcaggaaggcatgaccttcagcacgcaacctgcaggcgcgccggataccgactggttagctgataaagacatcgcatttttgccggaaggcgttgatgagaaaacagttattctaaatgaaggtgattttgttgtgttttatccgggggaagtgcataaaccgctgtgcgcagtgggcgcgccagcccaggttcgcaaagcagtagtgaagatgctgatggcgtgatgacttttcgccgtaaataactcaaggtttacggcgagtttgtgaaaagagcgttttttgatatttttttgtgagtaaaatttgtaatgcttagacgttcttattcactcaaggagttcgtcatgagcaaaataagtgatttaaattattctcaacacattacattagccgacaattttaaacaaaaaagtgaagttttaaatacctggcgtgttggaatgaatgattttgcccgtattgccggggggcaggataacagaaggaatattctttctcctggagcatttttagagtttttggcaaagatatttaccctgggttatgtggattttagcaaacgctccaacgaagcgggtagaaatatgatggctcatattaagtccagttcttattctaaagatactaatggcaatgaaaaaatgaagttttacatgaataatcctgtaggggaacgagcggatagtcccaaggtgattatagaaattagtctttccactatcactactatggggactcgtcaaggacatacagccattatatttccacaacctgatggtagcactaaccgttatgaagggaagtcctttgaaagaaaagatgagagtagtttacacctgattactaacaaggttctggcgtgttaccaaagtgaagctaacaagaaaatagcgcgtctattaaataataatcaggagttaaataatctacagaaattaaataatctacagaagttaaataatctactgaagttaaataatatacaggggttaaataatcctcaggagttaaataatccgcagaatttaaatgattctcaggagttaaataacagccaggaattaaatagtccacaggagttaaatgatccgcaggagttaaataattctcaggacttaaataactctaaggtgagttgtacagttagtgttgattctacgattacgggtttattaaaagaaccattgaataatgcattattagcaataaggaacgaacatctgctattaatgcctcatgtatgtgatgaaagcattagttacttactgggcgaaaaaggtatacttgaagaaatagataagctctacgcattaaatgatcacggaattgataatgacaaagtaggtaacaatgaaattaatgacatcaaagttaacctgtctcatattcttattgattccttagatgatgcaaaggttaaccttacaccggtcatcgatagcattctggagacttttagtaaatccccatatattaatgatgtaagaatactggattggtgttttaataaaagcatgcaatattttgatgatactaaaaagataaagcatgcatgctccgtaataaatcatattaatcttcgcagcgatcagtctaaaatagctgagacattatttttcaatctcgataaagaaccctataaaaatagccctgaattacaggggttgatttggaataagttggttgtatatgtcaatgaatttaacttaagtaatcgagaaaaaacaaatttaatacaaaggctatttgataatgttgagtctatatttaatgaagtacctgtcagcattttagtgaatgatatttttatgaatgatttctttatgaaaaatcctgagatgattaattggtacttccctcagttacttaagagttatgagggtgaaaagatttattttgataatttaaaatatgatttaaatgataatgataaggaatctaataaagaaattttgaagaatcaaccagataatgttatcaaagaaaaactgaataatgaatacaaacttagatttagaatgatgcaaactatcttgcaaagcagagttaatgtattaccatatattaatgaacagcgtttaaataaactaaatccaccggaaaatttacgtatagcaatagaacactttgggtggaagaatagacctatcactgcataaaataatgtgatgccgggatggtttgtatttcccggcatctttatagcgatagcaattatttactgagcgtcgcgaccatcaccgctttgatagtatgcatacggttttccgcctgatcaaaaacaatgctggcggcagattcgaagacctcatcagtgacttccataccgccatgtaggccaaattcttccgccattttcttgccaagcgtcgtttggtcgtcatgaaacgcgggcaggcagtggaggaatttgacctccgggttaccggtcaactgcatcatcttgctgttcacctgatattcacgcagcaatgcaatccgttccgcccatttctcttttgcttcccccatgctcacccacacatcggtatagataaagtcagcaccttcaactcccttcgcgacatcttcagtcagcgtaatattcccaccattttgctgtgccagggcgcggcattccgtaaccagcgcagcttccggccagcacgcttgtggcgcgaccagacgcaaatccagaccggtaagcgccgcagcttcgagcatgctattgcccatgttgttacgcgcgtcacctgcatagaccagcgtcatttcgttgaacgctttgccgggcaaatgctcctgcatggtgagaagatccgccagcagctgcgtgggatggaactcattggtcaggccattccataccggcacgctagcgtattccgccagtgtttcgacaatctcctgaccatagccgcgatactgaataccgtcatacatgcgaccaagcacgcgggcagtgtctttaatgctctctttatgaccaatctggctgccgcttgggccgagataagtaacgcgagcaccctggtcatatgcggcaacttcgaaagagcatcgggtacgagtgctgtctttttcgaagatgagcgcgatgtttttaccagtgagtttggcttcttctttaccgcttttcttatcggctttcagcttcgcggctaactgcagcaggctgttgagttcagctggcgtgaaatcgagtaatttcaggaaatgcttatgataaaacccggacatagatccctcctgtggctaacgcctcaatgaattaaaattcaatttatatggatgattattcatttgcaagtctaaagcataaatctttgtcacaaaggtggaggcaatgtcagtggtgtgtgacaataagagtatcggcaggacattaagaggaatgagccatggcaaacccggaacaactggaagaacagcgtgaagaaacacgtttgattattgaagaattactggaagatggcagcgatccggacgcgctgtacaccatcgaacaccatctttccgcagacgatctggaaaccctggaaaaagcagcagttgaagcgtttaaactcggttacgaagtgaccgatccagaagagctggaagttgaagatggtgatatcgtgatttgctgcgacatcctcagcgagtgcgcgttgaatgccgatctgatcgatgcccaggttgaacaactgatgacgctggcagagaaatttgacgttgagtacgacggatggggcacttactttgaagatcctaacggcgaagatggcgacgatgaagattttgtcgatgaagacgatgacggagttcgccactaattaagcgtagcgcatcaggcccaggtagttcctgcaacctggtgaatttgtagcccggataaggcattcatgtcacatccggcataaacaaaacgtacgttgttaatgttcgaatgcccgcgagttgaacacgcgggcatttttttagagttcgcgcaacatccgcacttcacaatcgacatggcccgtgcagccaagcgcatagtcgatatgctcaaagcccaaatgctcataaagcgcaatggcttcctttaaaaaagcggtcgtttccagatagcagcgtttgaaacccatctctcgcgcctgctccatcgccattaaggccagtttttttgccagccctttgccgcggatagccggaagaaaatacatcttttgcagttcgcaaatatcgctctcactcccggttaatggcgctatcccaccgccgccgaccacttcaccctcgtactcaacgacccaatatgcatggccaggctgactatatacttgatacagctcgtcaagattcggatcggcgacggtgtagcctttatcagcggtaagaccgtattcggcggatacctgacgaatgacgcgggcgatagcaggattatcctgcagcgtcaggcgacgcattacaggactttgcggcgcaatgttattcatagtttaacccaataaaaataaagtaattatacatttgtttaataccactctcttcttacgtacgcaagcgacttataaagtaataaagtttttgccagcctattactgataagagtattgtaacgtggcagaacattttactgtctgtatatataagttatatcaatggattttttaattcagggaatttttatggctcaagttattaatgaaatggatgttccgtcccatagctttgtttttcatggtacaggtgagagatattttcttatttgtgtggtgaatgtgttgttaacgattataacgctaggtatctatttaccatgggcattaatgaaatgtaagcgttatctttatgctaatatggaagttaacggacaacgattttcttatggaattaccggtgggaatgtttttgttagttgtcttttttttgtttttttctatttcgcaatcttaatgacagtgagtgcagatatgccgcttgttggttgtgttttgactttgttactgttggttttgcttatatttatggcagcaaaaggactgcgtcatcaggccttaatgaccagtctcaacggcgtaagatttagttttaattgctctatgaaagggttctggtgggtgacctttttcttgccgattttaatggccattgggatggggactgttttctttatcagcacaaagatgctacctgccaatagtagtagtagtgttattatatccatggttctgatggcaatagttggtattgtttccattggtatttttaatggtactttatatagtctggtaatgagttttctctggagtaataccagtttcggtatacatcgtttcaaggtgaaattagatactacgtattgtataaaatatgccattctcgcatttttagctttattgccttttctcgctgttgctggttatattatcttcgatcaaatattaaatgcgtatgatagttctgtatatgcaaatgatgacattgagaatttacagcaatttatggaaatgcaacgtaaaatgataatcgcgcagttaatctattattttgggattgctgttagcacaagttatttaacggtgtctttgcgaaaccattttatgagcaacctgagtctgaatgatgggcgtattcgttttcgcttaactttaacgtaccacggtatgctttatcgcatgtgtgcgttggtggtgatatccgggattacgggcggtctggcttatccactgctgaaaatatggatgattgactggcaggcaaaaaatacgtatttgctgggcgatttggatgaccttcctttaatcaataaagaagaacaaccagataaaggcttcttagccagtattagtcggggagttatgccttctttaccatttctgtaagagataaaaaaggccggagcatgctccggccttcgttttcatcactgtgttttgattacagcgcggcgataacagcctgctgttcaatcagtttcgctttcgcttccgcatagccttccagcttctcacgctctttcgcgatgaccgcttccggtgcgcgggcgacaaagccttcgttcgccagtttgttctcgatacggctgatttcaccttcaatcttcgccacttctttcgccagacgcgccagctcatcttctttgttgatgaggccagccatcgggatcagcagctctgcaccgtcgatgatcttcgtaacggaaaccggacctttgtcatcggcaggcagcacggtgatactttccagacgcgccagggtttgcaggaagccacggttttcatttacgcgacgttctgcatccgcgctgcaaccacgcagcagcagctccagcggtttgcccggcgcgatgttcatttctgcacggatgttacgtaccgcaacgatcgcctgtttcagccattcggtgtcggccagtgcggcttcatcaacctgagatgcatcgtactgcgggaacggctgcagcatgatggtgtcggcagtgataccgcaaagtactttcacacgctgccagatggtttcggtgatgaacggaatgatcggatgcgcgaggcgcagcagaccttccagtacagtcaccagcgtatggcgagtaccgcgcagttctgcttcggtgccaccgttcattaccggcttggtcagctcgagataccagtcacagaactggttccaggtgaactcatacagaatgcctgcggcgatatcgaagcggaagctgtccagcgcttcgcggtacgctttgatggtctggttgaactccgccagaatccagcggtccgccaggctcagcgtcatttcgccgccgttgaagccgcaatcctgaccttctgtgttcatcagcacaaagcggctggcgttccacagcttgttacagaagttacggtaaccttccagacgcttcatatcccagttgatgtcacgaccggtagacgccagcgccgccagggtgaagcgcagcgcgtcagtaccgtgcggctcaataccgttcgggaactgcttctcggtgcgcttacggattttgtccgccagctgcggctgcatcatattgccggtacgtttttccagcagttctggcaggctaataccgtcaaccatatccagtgggtcgataacgttacccttggatttggacatcttctggccttcgtcatcacgaatcaggccggtcatgtaaacggtgtggaacggcacctgcggtttgccattttcatctttgatgaagtgcatggtcatcatgatcatgcgggcaatccagaagaaaatgatgtcgaaaccagataccatcacgctggttgggtggaactgacgcagggcgtcggtattttccggccagccaagggtagagaaggtccacagcgcagaagagaaccaggtatcgagaacgtcttcgtcctgacgcaggacaacatcagcaccgaggttattttctttacgcacttcgtcttcgttgcggccaacataaacgttacccgcttcgtcataccatgccgggatacggtgaccccaccacaactgacgagagatacaccagtcctgaatatcgcgcatccaggagaagtacatgttttcgtactgcttcggtacgaactgaatgtcgccgttctcaaccgcttcaaccgccggtttcgccaggacatcggcacgcacgtaccactggtcggtcagcattggttcgataactacgccgccacggtcgccgtaaggaacggtcaggtcgtgcggtttaatttcttccagcaggccaagcgcgtcaactgcggcaacgactgctttacgtgcagcaaaacgctccagtttctggaactctgcagggatttcgctggaataaacgtcagattcgttacctttggtatcgaacacctgggcgctttcacggatatcgccgtcaaaggtcaggatgttgatcatcggcagggcgtgacgtttacccacttcatagtcgttaaagtcgtgcgccggagtgattttcacgcagccggtgcctttttccatgtcggcgtgttcgtcgccaacgatcggaatacgacggttaaccagcggcagaatgacatatttgccaatcagatctttgtaacgcggatcttccgggttaacggctacgccagtatcgcccagcagggtttctggacgggtagtcgcgaccaccagataatctttaccgtctgcggttttcgcaccgtcagccagcggatagcggatgtgccacatgctacctttgctttcgcggttttcgacttccaggtcagagatagcggtgcgcagtttcggatcccagtttaccaggcgtttgccacggtaaatcaggtcttctttatacagacgaacgaaaacttctttcaccgcattggacaggccttcgtccatggtgaagcgttcacgctcccagtcgacggagttgccgagacggcgcatctgacgggtaatggtgccgccagattccgctttccattcccagattttgtcgatgaaagcttcgcggccgtagtcgtgacgggttttaccttcttctgcggcaatcttgcgctcaacgaccatctgggtagcgatcccggcgtggtcagtaccgacctgccacagggtgtttttgccctgcatgcgctgatagcggatcatggtatccatgatggtttgctggaaggcgtgacccatatgcaaactgccggtgacgttcggcggcgggatcatgatgcagaaactttcctggctttcatcgccattaggcttaaagtagccctgcttttcccagtgctcgtaaagcggctgttcgatatcttgtgggttatatgtcttttccattatttccaggttgccgtattcaggttgaaaccagccacgcggtaggctttatagcgttcgcgcgccagttgtttcagagaatcttcataaggaacgaagtctaccacttctgtgaaagcggtggcaaaatctgcaaagcttgttcgcagactaatcaatatatcgcgccggctgctgctacgcttttgcggccaggcgatctccaccggtgcaccgccgcgcggtccttctcccgctaaattatgcggaacaaagctttctgccggacgcgcccacagggcttcatccagccggtaagcctgcttttcatcttcacaggcgatgagcacgcgcttaccgctgcgccaacgttctgcggcaatttcacacaccagttgctcaacggcgcttaagccatcgacggtggtgtcattgtccagaaggtagaacgtcgcgtttttcataaatggggcttcttgtggtggatttaaatacgcatcaggtatacaccgcagcgcctgatgcgacgctgttgtgtcttatcaggcctacgagttcagtgctgtgtaggtcggataaggcgttcacgccgcatccggcaataacagccttgcctgacgcaattactcttcgccgttaaacccagcgcggtttaacaggaactgtgccagcaacgctaccggacgaccggtggcgccttttgctttaccagaacgccaggcggtaccggcgatatccaggtgcgcccagttgtacttacgggtaaagcgactcaggaagcaacctgcggtaatcgccccaccaggacgaccgccaatgttcgccatatcggcaaaattggactccagttgttcctgatactcgtcacccagcggtaagcgccatgcgcggtcaccggattgttcagacgcggcaatcagttcatgggccagcggattatggttcgccatcagaccagtaatatgatgacccagcgcgatcacgcaggcaccggtcagcgtcgccacgtcaatcaccgcttccggctcaaaacgctcaacgtaagttaacacgtcgcacagtaccaggcggccttcagcgtcggtgttcagcacttcaacggtttgaccggacatggtggttaacacatcgcccggacgataggctcgtccgccaggcatgttttcgcagcctgccaacacgccgataacgttaatcggcagttgtagctccgcgaccatccgcatcacgccgtaaaccgctgccgcaccgcacatatcgtacttcatctcatccatgccttcactaggcttgatgctgataccgccggagtcgaaggttaaacctttacccaccagcacgattgggcgtgcatcttcgctcgcgttgcctttgtactcaatcacgctcatcaggctttcgttttggctaccctgaccgaccgccagataggaatgcatccccagctctttcatctgctgttcgccgataacgcgggtgatgacattcttgctgtagctgtcagccagctggcgcgcttgactagcgaggtaagcggcgttacagatattcggcggcatattgccgagatcttttgctgctttaatcccggcggcaatcgccagaccgtgctggatcgcgcgctcaccgctggtcagttcacggcgggtcggcacgttgaacaccatcttacgcagcggacgacgcggttcgctcttgttcgttttcagctgatcgaaactgtagagcgtctcttttgccgtctcgacagcctgacgcactttccagtagttgttacggcctttaacgtgcagctcagtcagaaagcagaccgcttccatactgccagtatcattcagcgtattaatggttttctgaataacctgcttgtactgacgctcatccagctcacgttctttgccgcaaccaataaggagaattcgctcggaaagtacattcggaacatggtgcagcaacaatgtctgccccggttttccttccagttcgccccgacgtagcagggcgctgatgtacccatcgctgattttatcgagctgttctgcaatcggagaaaggcgacgtggttcgaagacgcccacgacgatgcaggaactccgctgtttctccgggctaccgctttttacactaaactccatgcactacgctcctgaatcttaaagacaacggcggtggctacagatagaattgcaagctttcgtaactcatgtccgctgttgcgatgacttcgtgttaatcttaacgttattacggcattggcacgtcagaacaaaatctgagaggtgaatccgttgagtataattatcttagcgacgatttcgacgactcaagagaataaatgacgtttaagccatgaaacaagctaaaatcctgcaaaagacgagtttttacgggcgtatttaaagtgataatcataagatatctggtgcgggagacgctcaaaagccagctggcgatactcttcatcttgcttttgatcttcttctgtcaaaagttagtgaggatcctcggcgcagcggttgacggcgatattccggcgaatctggtgctctcccttctcgggttgggcgtgccggaaatggcgcagcttatcctgccattaagcctgttcctcgggctgctgatgacgctgggcaaactgtataccgaaagtgaaattacggtaatgcatgcctgcggcctgagcaaagcggttctggtgaaagcggcaatgatccttgcggtattcacggcaatcgtagcggcggttaacgtgatgtgggcgggaccgtggagtagccgtcatcaggatgaagtgttagcagaagcgaaagcgaaccctggcatggcggcgctggcgcaagggcaattccagcaagcgactaatggcagcagcgtgctgttcatcgaaagcgttgacggcagcgatttcaaagatgtgttcctcgcgcaaattcgaccaaaaggtaatgcacgtccttctgtggtggtggccgattccggacatttaacccagctgcgcgacggctcccaggtcgtcactctcaaccagggaacgcgcttcgaaggcactgcattgttacgtgatttccgcattacggacttccaggattatcaggcgatcattggtcaccaggcggtggcgctcgacccgaacgataccgaccagatggacatgcgcacattgtggaacactgacaccgatcgtgctcgcgcagaactgaactggcgtatcacgttggtattcaccgtgtttatgatggcacttatggtcgtaccgctgagcgtggttaacccacgtcagggacgcgtactgagcatgctgccagccatgctgctgtatctacttttcttcctgatccagacctccctgaaaagcaacggcggtaaaggtaagctggacccgacgctgtggatgtggaccgttaacctgatttatctggctttagcgattgttctcaacctttgggacaccgtgccggtccgccgcctgcgcgccagttttagccgtaaaggagcggtgtgatgcaaccttttggcgtacttgaccgctatatcggtaaaactattttcaccaccatcatgatgacactgttcatgctggtgagcctgagcggcattatcaagtttgtcgatcagctgaaaaaagccgggcaggggagttacgacgcgttaggcgcaggaatgtataccttgctgagcgtgccgaaagatgtgcagatcttcttcccgatggcggctctgcttggggcgttgcttggtcttgggatgctggcgcagcgcagcgaactggtggtgatgcaggcttctggttttacccgtatgcaggtggcgctgagcgtgatgaaaaccgccattccgctggtcttgctgacgatggcgattggcgaatgggtcgcgccgcagggcgagcagatggcgcgtaactaccgtgcgcaggcgatgtacggcggcagcttgctctctacccagcaaggcttatgggcgaaagatggcaacaacttcgtctacattgagcgggttaaaggtgacgaagagttaggtggcatcagcatttatgcctttaacgagaatcgtcgtctgcaatccgtacgctatgccgctactgcgaagtttgacccggaacataaagtctggcgtctgagccaggttgatgaatctgatctgaccaatccgaaacagattaccggtagccagacggtgagcggcacctggaaaaccaacctcacgccggacaaactgggcgtggtggcgctggacccggatgcactctctatcagcggtttgcacaactatgtgaagtatctgaagagcagcggtcaggatgccggacgttatcagctcaacatgtggagcaaaatcttccagccgctatctgtggcggtgatgatgctgatggcgctgagcttcatctttggcccactgcgtagcgtaccgatgggcgtgcgtgtggtcaccggtatcagtttcggttttgtcttctacgtactggaccagatcttcggcccgctgacgttggtttatggcatcccgccgatcatcggcgcactgttgccaagcgccagcttcttcttaatcagcctgtggctgttaatgagaaaaagctaaccgaatgaacgaataaagggagcgaaagctccctttattattgttagcaaagtgtgcttcgttcattcctgaaaaataattaaaattcaatatattgcagtggggtgggcatgataagacgcgccagcgtcgcatcaggcaaagacaaatctcgcctgacttaccttcttctcccccccagcaaactccccaacatcccgcgtacaatctgattcgtcacttggcgagcggcgcttttggccattgtttgcaccacaccatctttcttcccgccgcgtggtccggtagtgccgaacaaaatatccttcaatccaccaagaatgccgtcatccaccgctacctctttccctttcgcgggaggattattttgctgctcggtactggcctgaaagcctttttgcaacatctcataggcggattcccggtccacctcatcctcatatttgccatacaccggagagtgattaatcaagccattacgctcatcttccgtcaccggccccatccggctacaaggcgcgatcaccatcgcacgctccaccacagaagggcttcctttcgcatccagaaaagagatcaacgcctcgccggtgcccagttcctgaatcgccttttcggtatcaaacgccggattggcccgcatggtttgcgccgctgccttcactgctttctgatcttttggcgtaaaagcccgcaaagcatgttgaacgcgattaccgagctgcccgagcacattatccggaatatcagacgggttttggctaacgaaccagacgcccacgcctttactgcgaataagccttatcacctgctcaatcttatccagcagtacctgcggggcatcgttaaacagcagatgtgcctcgtcgaagaaaaacaccagttttggtttctccagatcgcccgcttccggcaattgttcatacaactcactaagcatccacagcaggctggcggcgtacagtttcggcatctgataaagtttctcggcgctgaggatattgataacgcctttaccgttggcatcggtgcgcatccagtctttgatatccagcatcggctcaccaaagaagtgtgctgcgccttgctgttccaggctcaacagcccgcgctggatggcaccaacgcttgcgctactgatattaccgtactgattctggaaggatttggcgttatcgccgatgtactgggtaattgcccgcagatctttaaagtcgagcagtaacagcccctgatcgtcagcaatgcggaagatgatattcagcacgccagattgcacatcgttgagattcaacagtcgtgccagcaacagcggccccagatcgctaaccgtcgcccgcaccggatggcctttctcgccaaagatatcccacaccaccaccggattggcatgcggttgccagtcattgacgccgatatttttaagccttgcgagcagtttttcgctcaccgttcctgcctgcgcgacgccggtcagatcgcctttcacatcagccataaacaccggcacgccgatttcgctcaaactctccgccagtttttgcagcgtaacggttttacccgtccccgttgcgccggtaatcagcccatgacggttagccattcccggcagtaaaaacagttctgtgtccggcgtgcgggcaattaacaggggttcactcatgagatatcctccagtttcctgcctggagtataggcaacgtccggcaaagagaatacgtgtaatgaagagaaaataacttaaagcgtgttgccgtgataaatctgatacccgaggtcaacagtgttgtggttgtgatcgttatttttaattttgctcagcaacatttgggcggccatccgaccaatatcaaaacggggagtaattacgctggcgaggcttgggatcatttgcctgccaatctccagcccatgaaaacccgcaatggaaatttgttctggcacggcgaggtttcgctcgcggcacagcagaagcgcacccatcgcaatatcgtcattggtgcaaaatacaccgtctaaatccgggtttgcgctaagggcatcacgcattaactgcattcctaaatgaatggaactgatggcgcgtggattcatgcgtaatggggaaagattatgcagcatcatcgcatcgcaatacccctgataacgctgttcatcgcgggtgtcatctttggaaccgagatacagaattttgtgcctgactcgcttctccagcatggtacacaccatgtcaaaagcggcctgccgattatcaaaaccgacctccatatccagccgttctccctgtacatccatcaattccacgaccggaatggtggcactacgcagaaatttcaccgtcctgatggtgtgatatttttcgctaagtataatcccgtcaatgttataagagagcaggttaatcacgctctcttcttcggaatcgcgatcgtaattgtaattagcaataagggtctgataattatgctcagaggtgacggattctattcccgcgagaatgtcagcgaagagttgattttgaaaactcggaatcaagataccgagggtataactttgtgcattcaacaacatgccgggagcgcgattagggatataattgatctcttccataattttggcgatgcgctcgcctgtttcctttgccacctttttcgggctgcggatataacgactcacggtcatttttgttacgccagccagcgtagcgatatcctgtaaagaaattctgtgattgcgcataacttctcccaacgtcgggggaatcttcaatcttcccccgaaactacatcacaatattttattctttcagtgcaatacggcgttaatggctaacacgcccagcaaacccataatagaaataagggtttccatcaccgtccaggtacgcaacgtttcaccaaccgtcagattaaaataccctttaaatagccagaagccagggtcgtttacgtgactcgcgatcacgctgcccgcaccggttgccagtaccattaaagcgggatcggcatgggtaacgttgataatcggcaacaccacacccgcggtggtaatggccgcgacggtggcagagcccagagcgatacgcaacagcgccgcaacagtccagcacatcaataacgggctaagtgtagttccggtcattaagtgactaatatagtgcccgacaccgctatctactaatacctgcttaaacgcgccgccgccagcgataataaacacaatcatcgcgatagcgcctatagaatccccaatgatatccatgatttgctcgatggtgcgtccattacgtcggcccagtgtgaaaatcgcaataacaatggcaataaacagcgcaacggcagggttaccgacaaattcaaagaagaggcgcacggtgttagttttcggtaacgtaatttcacaaacggcggcgatagccatcaggatgaccgggatcacggcagcgaaaatactgttccagaaggagggcatctcctcttcgctaaacagatgaggattaaataagccttccggtggtgctttctcaaagcgagttagcagtttagaaaacagcggtcctgcgacaataactgtcggaatggtaatgataaatccatacagtaaagtcgttccgagattagcctcaaagatagtcgcgatggcagtaggccctggatgtggcggcagaaaacagtgggttacagagagcgctgctaccattggtacgccaacatacaacaggggtaatccactacttgctacgatggtaaataccaacggcaacagcaggacaaaacccacttcaaaaaacatggcgaggcccacaaccagaccggtgatcactagcgcccattgcacgcgttttttaccaaaagtagcaatcagcgtagtggcgatacgttgtgccgcacccgtatcagaaatcagcttgcctaacatggccccgaaaccgaggatcattgccagcccgccgagcgtgctgccgataccattttgtatagagtgcaggacggcctgtgcatccatcccttcggcaaatccgacgacggcagctaccagaacgagggcaataaagccgttaactttaaagccgatcatcaggataagaagcagcgcgacgcctgccgcaataatgattaatggcatagtctttatctcttattagtgccagaaaagcagcgctttcgcgctgcacgtaggggggctgttaaacagccactaacatgccgccatcaacaaacaacaggtggccgtttacgaaatcagaggctttactagaaaggaacaccgcagcaccaatcagttcctgcggatctccccagcgtgcggcgggggtccgtttgcacaaccaggcggtgaaggcttcgtcctcaaccagtgctttagtcatttctgttttgaaatagcccggcgcaataccgttgacctgaatattgtggcgcgccagctcgacgcacatgccgcgggtgagcatttttaccgcccctttgcttgcggcataaggggtgatggtgtcacgtcccagttcgctttgcatgctgcaaatattaataactttacctgccttgcgttcaaccatgtgacgagttaccgcttggcttaccaggaacacggcggtctggtttactgcgatcacatcattccactcttgttcagggaactcagtaaaaggatgacggcgctggataccggcgttattcaccagcacatcaatggggccgatgtccttttcgatatgttcaacggcggcatcaatttcatgtttatgagtaacattaaaaggtgcggcaacggcctgaataccctcctggtggagtttttctacagcaagttctgcgcgttcggcagtaatatcattaataattatttgtgcgccatatttacccaggccggttgccagtaaaaagccaatgccctgtgcactaccggtaatcaagatattttttcctgccagactaaatagatcgttcattgtattattcctttatttatctcttagaaaacaagctggacttttgctgcctgggttttatcaccggcgaaacgtagcgcctcttccaggtcagtgaagggatattcagcactcagtaaaggcagtggattgataacgccattcgccagccaactcactgcggtattaaattcgctggtaaaacggaaagagcctctgagactaatctccttaccaatcaacgtcatcattgggaattctgccatcgcgcctcccatacctacctgcaccattacgccgcgtgcacgagtgacctccagacaggtattcacactactaggatgaccggacacttcaaagctgacatcgaaatagcctttttccgctttccagtgatccatgtcgtcgttttgtgggtttacgagcacatccgcccccatctctttgcccaggctaagggaacggggactcacatcagcacagacaatttccgcggcccccagtgttttcactgcactgacaatcaggcagccaatgggtccaacaccggaaataaatactcgcttgccctgtaactcgccggcctgatgtgcggcatgaatcgcgacggctaaaggttcggcaaaagccataaccttttcgtcagctttggccggataagggacacattggctcgtttcgaccattttataacgggtaaaaccaccatcaacatgagggaaatacatggcactgccaaaaaaacgcatatctgtacactgattctcgttatgttcaatgcagtatttgcagtgaccgcacggtttagacggattaatggctaccgtttgcccttcatgtaattcactactgtcgctatgaataactttaccgataacttcatgacctaacaccatcggtgcctttatcatgaaattacctacttttccttcctgataataatgtaaatcggaaccgcaaattccacctcgggttatttgtactaatgttccattattattccaatctatcgtctgctcggtaacggcaacagttttcttgcccgcaacaacgcaggactgtgttttcacttgcataaattcctcactggtcaggtagacacctcggaagcatttaagcggttttaactgtcattatttgtgatgaagatcacgtcagaaaattgttacattactatgttacgcataacgtgatgtgccttgtaattcttatcagtagaaataaaaaaacgtgaaattattatgccgccaggcgtagtatcgcagcaggtaagatgattcaggagattttaaatggcgggtgaaagctttattttgatgggcgttagtgggagtggtaaaacattaattggtagcaaggttgccgcgttattatctgctaaatttattgatggtgacgatcttcatccagccaaaaatatagataaaatgagccagggtattccattatctgatgaagatcgacttccctggctggaacgcttaaatgatgctagttacagtctttataaaaagaatgaaacaggatttattgtctgtagtagtttaaaaaaacagtatcgtgatattttacgcaagggtagcccccatgttcatttcctctggttagatggcgactatgaaactattctcgcgcgaatgcagcgtcgggctgggcattttatgccggtagcgttactaaaaagtcagtttgaggcactggagcgtccacaagcagatgaacaggatattgtgcgcattgatatcaaccatgatattgccaatgtcaccgaacaatgtcggcaggctgtgctggcgatacgacaaaacagaatatgtgcgaaagagggcagcgccagtgatcagcgctgcgaatgattttcaaaaatcggctttcaacaccacgcggtaacgcgccttaccgtcgcgcacatgctggatggcgtcgttaattttgctcatcgggaacagttcggtggtcggcgcaaccttgctgcgggcggcaaaacgcatcagcttacgcagctcataaggcgtgccggtagcagaaccagagacgctgcgatcgcccgcaattaacgtaaaggccggaacagacagcggcgtgagaaccgcaccgaccgtatggaaattaccgccataggtcagcgcctcaaaatagggctgccagtcgaggctgacgttgacggtgttgataatgagatcaaactgccccgccagtgctttcagtgcctgcggatcgcggctattcaccactttatcggcacccatcgccagcacttcctgctctttcgccggattagaactaaaggctgtcacctcgcatcccattgcgtgcagaagttttatagcgatatgccccagcccgccaataccaattaccccaacgcggctggtagcagtgatatggtgcatcaacagtggtttaaagaccgtgataccgccgcacaacagcggcccggcggactcgatatcaatattttctggcagtggaatcacccattgccagtccgcacgcaacttctcggcaaagccaccgcgattcataatcgtcggcaccgcaccttgctcgcagttgatctgattaccgctaatacaggcgtcgcagtgaccacagctacgcgccgtccagccaatcccgacacgctgaccgacctgcaaacctttatcctgcgcggcgctcccgagtgccaccacgcgcccaatcacctcatgcccggcaaccagcggatattgactaaatccccattcgttatcgatcatgctcagatcggaatggcagatcccgcagtaatccacctgcacttcaacatcttgtggcctcagctcaccgggatcgtactcataaacttccagttcgccgcccgcttcttttgcggcatagctttttatcatgctcattttttggtccttctctggtgttgtttgggaagtgtagagcatggcagggcggggtgcctggagtgtgacaaaggttacacatcgctgtatgcaatgctgaaaatttcagcacttagcgaggtgcgagcaagctggcgcttgcatggtggcgtgcgacaggtataatccacaacgttttccgcatacctcttcagtgccgaagtggcgaaatcggtagacgcagttgattcaaaatcaaccgtagaaatacgtgccggttcgagtccggccttcggcaccaaaagtatgtaaatagacctcaactgaggtctttttttatgcctgaaatccagtgtttatctatctttcccgctatattaactctctcaaggtcaaccgatatcaacgtacatctaccaacatatgttggtacagatgatggtatttccggttcgataatgcttgtaccaacagggagggaatacgagaaatcacaggacattgctaatgctggtacgcaatattacctgaagctaaaaacctgcacgttagccctttgtaggccagataagacgcgtcagcgtcgcatctggcataaacaaagcgcactttgctggtctgttcccctcaccctaaccctctccccggaggggcgaggggactgtccgggcacatttttagactttgtcatcagtctgagcctgccattggcaggctctggtgtccttttacgctaccatgctaataatcagcacaataatcagcccaaccacggagttgaccagctccagcagaccccaggttttcaacgtgtcttttacactcaggtcaaagtaacctttgaacaaccagaaagatgcatcgttaatgtgggtgagggtgttggaacccgcagccgtcgccagtaccagcagcgccggattcacgccaaccagctgaccagttgctggatctaggattgcagcactgataatcccggcggcggtcatcgcgctaacgacaccctgacccgtcgccagacgaattagcacagtgatcagccatgccatgatgtaggggctgatattgccgtgggacatcaacatgccgatggtgtcgccaatgccggtgtcgatgatggtctgcttcagcacgccacccgcaccgatgatcagaatcaccattgcaatactcttcaccgcgctttcaaaagcgttcatcacccactgcatgtcatgaccacgtgcggtgccaaagagtacgaatgcaaccaccatcgcaataaacattgcaatcgggctggaaccgataaagttaaccacttcccaggcaggggtatcttttaccagccagatattggcgatggtggtagagatcataatgatcgccgggatcagcggcaccagaatgctaacgccgaaagagggcagattattcatatctaccggttgatctgctttcaggaaacttggcgttgggcgctcaagattgccgaggaacttcggcaggatcagacctgcgcagattacacttgggatcgtcaccagtacgccatagatataaaccatccccatatccgcgccataagcattcaccagcgccaccggacccggctgcggtgggaacagactatgtgcggtagtggcagctgctactgccgggatcgccagtttcaggaacggaattttagcttcggcggcaataacaataaccagcggcgctaacatgataaaggccacttcatagaacatcgccagaccaaaaatcaggccgatgataatcacgctcagctgtacatagcgcagaccgagacgcgccagcagcgtatgcgctatctggtgagccgcgccggagtcgaccatcaatttaccgatgaccgcaccgaacaccacgatgatagccagttcccccagcgtgttgccgaagcccgctttcatagtgtgcagcaggctcatcaaatccatgcccgccagcatcccgacggacagcgccgccaccaacaaagccaccatactattgattttgaacttcaaattcagtaccagcatcagaccaatgccgaataccacccagagaatgttaagcacatgcataacgttttaccttacctggttgaaccgttgttattttgggcgatatgttatgtaaattggtcaaccattgttgcgatgaatgtcacatcctctgatcaataaccatcgattaccctttgctgcaatttgcagcaacaaccatgagagtgaaattcttgtgatgtggttaaccaatttcagaattcgggttgacatgtcttaccaaaaggtagaacttatacgccatctcatccgatgcaacgccacggctgcggtctggttgttcatccggatacctaaacaactccagggttccgcgtctctttgctgtggaacccactatgtgaaagaggaaaaatcatggaacagacctggcgctggtacggcccaaacgatccggtttctttagctgatgtccgtcaggcgggcgcaactggcgtggttaccgcgctgcaccatatcccgaacggcgaagtatggtccgttgaagagatcctcaaacgcaaggcgatcattgaagacgcaggcctggtgtggtctgtcgtagaaagcgtgccaattcacgaagatatcaaaacccacactggcaactatgagcagtggatcgctaactatcagcagactctgcgcaacctggcgcagtgtggcattcgcaccgtgtgctacaacttcatgccggtgctcgactggacccgtactgacctcgaatacgtgctgccagacggctccaaagctctgcgcttcgaccagatcgaattcgctgcattcgaaatgcatatcctgaaacgcccaggcgcggaagcggattacaccgaagaagaaattgctcaggcagctgaacgcttcgccactatgagcgatgaagacaaagcgcgtctgacccgtaacatcattgctggtcttccgggcgcggaagaaggctacaccctcgaccagttccgtaaacacctggagctgtacaaagatatcgacaaagcgaagctgcgcgaaaactttgccgtcttcctgaaagcgattattccagttgctgaagaagtcggcgtgcgtatggctgttcacccggacgatccgccgcgcccgatcctcggcctgccgcgcattgtttccaccattgaagatatgcagtggatggttgataccgtaaacagcatggcaaacggttttaccatgtgcaccggttcctacggcgtgcgtgctgacaacgatctggttgatatgatcaagcagttcggtccgcgtatttacttcacccatctgcgctccaccatgcgtgaagataacccgaaaaccttccacgaagcggcgcacctgaacggtgacgttgatatgtacgaagtggtgaaagcgattgttgaagaagaacaccgtcgtaaagcggaaggcaaagaagacctgatcccgatgcgtccggaccacggtcatcagatgctggacgacctgaagaagaaaaccaacccaggttactccgcaattggtcgtctgaaaggcctggccgaagttcgcggtgtcgaactggcgatccagcgcgctttctttagccgttaatatccaccggcatggctgcgcgccgtgccggttccttcttccttgccgtcactctttgaagacggattctggagtttacgatgactactattgttgacagcaatctgccggttgcccgcccgagttgggatcattctcgtctggaaagtcgcattgtgcatctcggttgcggggcgtttcaccgcgcgcaccaggcgctgtatacccatcatctgctggaaagcaccgacagcgactggggcatctgcgaagttaacctgatgccaggcaacgaccgcgtgctgatcgaaaacctgaaaaaacagcaactgctgtacaccgtagcggaaaaaggcgcagagagcaccgagctgaaaattatcggtagcatgaaagaagcgctgcatccggaaatcgatggctgcgaaggtattctcaacgcgatggcgcgtccgcaaacggcgattgtctctctaacggtcacggaaaaaggctactgcgctgatgcggcaagcggtcaactggatctcaataacccgctgatcaagcacgatctggaaaacccgactgcgccgaagtccgcgattggttacatcgtcgaagcgttgcgtctgcgtcgtgaaaaagggttgaaagcgtttacggtgatgtcctgcgataacgtgcgtgaaaacggtcatgtggcgaaggtcgcggtactggggctggctcaggcgcgtgacccgcagctggcggcatggattgaagaaaatgtcaccttcccgtgcaccatggttgaccgcatcgttccggcggcgacgccagaaaccttacaggaaattgctgaccagctgggtgtttacgacccgtgcgccattgcctgcgaaccgttccgtcagtgggtgattgaagataacttcgttaatggtcgcccggattgggataaagtgggcgcacagttcgttgcagacgttgtgccgttcgaaatgatgaagctgcgtatgctgaacggcagccactcttttctggcgtacctcggttacctcggcggctatgaaaccattgccgacaccgtgactaacccggcttatcgcaaagcggcctttgccctgatgatgcaggaacaagcgccaacgctgagcatgccggaaggtacagacctgaacgcctatgcgacgctgctgatcgagcgtttcagcaacccgtctctgcgtcaccgtacctggcagattgcgatggacggcagccagaagttaccgcagcgtctgctggacccggtgcgtctgcacctgcaaaacggcggcagctggcgtcacctggcgctgggcgtggctggctggatgcgttacacccagggcgtggatgagcagggtaatgccattgacgtggtcgacccgatgctggcggagttccagaagatcaacgcgcagtatcagggcgcagaccgcgtgaaagcgctgctgggcctgagcggtatttttgccgatgatctgccgcagaatgccgactttgttggcgcagtgacggcggcatatcagcagctgtgcgaacgcggtgcgcgcgagtgtgtggctgcgctgtaactaactgattaccctacagacttactggtcaatcaaactgatatttggttgaccagttttcgtttttttgcccacctgtacgtgccaacttccagtgctaatggtatagtttgagattaacgggggccgtaaaattgcccgttgtaggccggataaggcgttcacgccgcatccggcaaaaatttgattaaccgcacctaacggacacaacaccatgaaatctgccacctctgcgcaaagaccttaccaggaagtcggggcgatgatccgcgatctgatcataaagacgccgtacaatcctggcgaacggctgccgccggagcgtgaaattgcagaaatgcttgatgtcacgcggacggtggtacgtgaagcgctgatcatgctggagatcaaagggctggtggaagtacgccggggtgccggtatctatgttcttgataacagtggcagccagaacacagacagtccggatgccaacgtctgcaacgatgccggtccttttgagctgttacaggcgcggcagttattggagagcaacatcgccgagtttgccgctttgcaggctacccgcgaagatatcgtcaaaatgcgtcaggcattgcaactggaagagcgtgaactggcttccagtgcgccgggcagcagcgaaagcggtgacatgcagttccatctcgctattgccgaagcaacgcataacagcatgctggtggagctgttccgtcagtcctggcagtggcgggaaaacaatccaatgtggatccagttgcacagccatctggatgacagcctgtatcgcaaagagtggttgggcgatcacaaacagatcctcgccgcgttaatcaaaaaagatgcccgagcggcgaagctggcaatgtggcagcatctggaaaacgttaagcaacgtctgctggaattcagcaacgttgacgatatttattttgatggctatctgtttgatagttggccgctggataaagtcgacgcctgacttattataataagcgcaagggtaaacgttccttgcgctttcttaaattaagaagtcgcaatgagtattactttgtaaattgcagggtattgtttagctatctgtataacctgaatgttagtactcattcttcctggtagtaaggcgagattattaaagttgccatgcagcgtccggggaagtgttgggcgctgttttttttgtttcttaataatgtgttgtaagccgtagaaggcgtgtaggtcgcaccctatgcgacctacacatcagtcaggaattacccttcacgttctaccactttaatttccaccatgccgatcccgagcttacgcgggctgtgtccgaggatattcccttcgttggtactgacaggttccggcggcacaattaccagtgtgtcggcatcggttgggttatcgaaatgcagtgtggtggtggtcacttcattgcccagcacaagagtttgttcttcattgcctacgcgtaccggaataggacggctggcgttattgccgtatgctttggcggtaatcaccaggtcaaatttcttcggcagcggatgcttgtactcgatttttacttcatcgcccagctgcgcgttggaccagcggccccagctctccggacgggaaatcccgctaaactgtttcacctcttctggcgcaccggcgacgttaaagatgaaactgtcggctttgtagcgaatatcgttatcaacaatcttcagcgtatcgacattgcctttgtaacgcgccatgtcgatgaccgtatctttaaatgccgttttgccctgccatgttgttttgtcaacatgctgaacaatttgctgaccgccaagctgcccttggctgacacaccagtcggtggaaagtgccagttccggagcccagagttgtgccatcttgtagcaacggtcaacccagacgaaattgtcgcgtggagcgaaatcggccagctggaaacgcagcggtgcactgtattcgctttccggcagcggttccacgcgtttgtcactaacccgcaacagcagcggcaaacggaaatggctaccgctgaaggcaatcatgtttttctgctggtcgatggtgaactctttcatctctttagggaatttccacaggcggatgatatctggcttccacgccaatgttttctctttgatattgaggaagatttcgctcatgctctgcccggataaactgctacgaccaagtccgagatagttatcgccaccgagaatgtccagcaccgtcgcgccgttatccatcgtgttacgcttcactgccagcgtctcttgctgcggcttgtcgccacgaatgacaaaaaacaggttattgcgatcctgcttattgaggtatttccacgccgtgttgttcatcgctaaatggtcagaagagacgacgatgacggtatctttaaaccacggactcgctttgattttgttgataaacgtcgcgatgttctcctggctgcaacttaccgcgctgaaactctgattcggtttaccgtcaaaatcatattttttgcggttacaggtacgagagataaaaccatccgggtgatgggtatcgactgtcagggtaaacagactgaatcgctgaccactgcgggaaagctcttcaaactttttccacgcttcatcgagaacggtatcgtcgtagaatccccagtcgttgcgatagtgcgggtcggctaccacgcttttcagctcttcactgccgtataagtggtcgaagccatggctcttcaggaacacatctttaccggcaaaacgcagattcgcgccctgcacgaaatagttctgataaccgctgtttttcaggatatctcccagacagatgttctgcgggaagaagctggagacagaggcggaggcgttgccttcaaagggggcaaacagcggtatgccgcactgagaagccaccatgcccgcaatcgtgtaatctgttcccggcagctgctgcgtgtggctgaaatccaggccttcatttttcaacgcgcccagttcaggcgtgagatccgggaaagcctcgttatcaaaataggtccgctcgagactttcgccgtagatataaaccaggttgagtttcgggtcagggatagttttgctcggctctttataataagccgcaaagtccgggtcgccgtcgcgactctgggatttcaccagttccgttatctgacgaaatgccgggctggcgtccacgctacccagcgccagtaagagcgccagcaggctgtaaccaaaatggtgcggatgatggcgacgacggcgcaggatccagcccagcgcaccgaacaccgctgtcagccccagcacaatgccgatacccggcaaaatgtatttgctgacgccagcaccggtcaggctgttggttaaggtatagagaaccgcgtcgttaataccatcgccagtaaaatagtcgctggcaaacagggtgatatttaaaacgacaaatagccccagcaccgttaacgtggctgcaaaccaccaggtgttacgtcccgctttccatgcgtaaatcagcacagaggcgagaaaaagggcgaaagagagtagttcactcaacgggcgatcctcactaaaccgggccgtttagccaacgtttaagctttttgagaagcacaatgtaatggcgtcgccatattgctgcaattctagtgtcaaaaaaatgcgatgttgttaggaattagtttataaacagacttttttgattacggtcacttcccgtgtaacaggggtaaaaccgtccaggagcagggaaaagggcaggagagagccgcgtcagccgggtaacagctaaaacgcggcgtttcgcggttcaggaaatgaagttcagcccctgttttaacaccagatcgcaggctttggttttcaccttttctgccagcggagttgttccgatgttatccagattgagttgctgaccatctttggttttcagcaaaccctgaatgccgtccagatagttggtgtcttctttttgctcttcactgttcaggcccagcttttccagcacctggttcttgatgttttcggcatcggttacgctcgccagcttttgcttcgcgcagtattgcagaatgcctgcggcattgttcatgttatctgcgcttaaggcctggtttccgctgctaagcaagttagttaaactcgcgaggctccaaccgccttcctgtgtcgtgctgttttggttgccaagttcgctggcggcgctggagagcgcatctttccaggacgcagcatgcaccccggtggaaattaatgcgctggcggcaatggcacagcacagaagatgtttaacagttttcatcatcattactcaaggtggaattgtgtcgcagtataccgccagaaacggggattaatactctttacctgttacccggctacggtagctatcccagttgaagatcacccacaaactgttacccaggcgcatacggtccatcacgcgttcgcccagcaacttggtcatctcttccatattactgttggtcagcatcccggttgggcgtttggaagaagagcggcgatcgacgatctggttgatgatcactttttcgtatttgctttcggtctgcacgccgatctcatcgatcaccagcagatcaacgttgctcagatcgttaagcagttgttcttcgctggtaccgctattcctgaaggtatctttcatcgcgctcataatatcggccacggtgatgatcaatacggatttaccgcgtagcagcagctcgttgcagattgccgccgccagatggtttttgccggttcctggcttaccagaaaagatgaagctggcgatgttgccgtcaaactcttcgacatactggcgcgctttgcttaacgcattcatctgcccttcacactcaacgcgatagttctcaaaggaacagttctgatgcagtggacgaataccggagcggttaaaggtgcgctgcattttcatcgcccgattttcacgttcgagagcggcggagcggatcgctccttgttctttttgccaggccagtagttcttcacccgttttgaatgcgggtttgatatgggcaggcatcattttttgcaggcgttgcatcaggtcgccaacgtttttcatcgttaccctctgaatcctggtggaatttggctgtcaggttcgctgaccgtattcacatctcgtttcggcagtccgccgttgctggcacgaccgatttgcaggctgcgcgccagtttttgttgccactgcacatggtgaaagactttaccttccgcctgccagtaggcaatgaaactggccagttcttcggtggtcaccggctctcttagcgccacgccccatagcgccgccaggcggataaaatcggcatcgggttgccagtccggatacatggcgaatttccccatgggtacagcaacgggagcggcttgcggttcctgatagagttgatcgtccagagcgacatcgcttcccggacgcgccagcttttcttccagcgccagcagttcagccaggcgtgcaggcgtgacggcataaaacgccggggcattgttagcaaatacggcaaccacaccgccttcagcttttgccagaacggtttggtgatcgtgtaccagggcgtcaataccaacgacgtccggggtcaaaactctggaagacatactgtttctcaaatatggaacgatgaacgagaagggagataacttttatagtaacacacggaggagaggaggctgtctctcatccgtgtgcttaagcgaggcaattttatacgcgagggcgcttgcggtacaaccataatccaggaatggaaagaccgatggataacgcaccaacaatgctactagctgtaagaaagttggttaacagggtaatcatcaacggttcgctgtaacctaactggctgatttttaccgcgctaatcattgcggtataagcgcttatgcccgggaacatagggataacggccgccacggtaaacactttcggatgcgccagataccagcggctccattgaataccaatggtaccgaccagcatagaagccataaaggtactccactcaatattcaacccgctggtcatcaagatcattcgggaaccatgacctatcgagccaagcagcgcacaccagcgtaacgcccgcacgggaacgttgaacaccatcgcaaagccgaccgcaggaatggcggcgaggatcatatcctgcgccaacgctaacagaaattcgatcacacccatccgcgtagcccccaaatcgtcagtgccatcactacgccgacgcaggtagccagtgtcagcagactggcgatcgcccagcgtgccagtccggtattgatgtggcctttaaacatatcggcgacggcattaatcaacggaaagcccggcactagcagcagaacgctggcggccatcgcaatggtgggggtattgctgaaagtggggagttgcaaaagcaatccggaaatggtggtggcggcgaaagcggtaaggcaaaagttgatctgtggatgaagatgacgttgtgccagcagctggcggatatacatcgcggtcgtactggcaaagaaggtgatgacggcaccatcccagccaccgttattgagtttacagaaacaggcgcaagaaaggccaaccattaaggctaccagccatcttgggtaacgtaatggctgaatttggctaaatcgtttctctacgcctttgtaatccagcagatgatgctccgcaagaatcacaatgtgctggacttcagtcaccacatgcatattaatgccgcgatcgtgatttttacgtgtgcttgtcaggcattgcccatctttaatagttgtcagcactatggcgttgctagagatagaactttcgacgctgtccattcccagtgcccgacccagtcgactggaaagctcatcaaccaacgcgctttccgcaccatgttgcaaaagaaataatccacactggatacaaagccgtgttacggctcgctgttgctcagtttgcataactcgccctttgtcatagacgtgctgcgtattgttcagataatgagaatccatttgtatcatgaagcacggttgttttgcggtaggttaagatcaaaattgcgctgattaatcctggttatcgggagaagctcggtgataaaaagcgaattatctctcgccgcaaacaaactatcacatgaatattatcatcataatgaatttattgtttggcctttacgaatcaggataatagataaccgggcacgttttttaatgttaacaagctaaaaccatcagatttcattgaataaatattggttgtgtgattttgcattctgcgggaagggatatcatttaattataaattaaatgaatgtgatttctgtttttcattaagtattcctaacaacttaatgtagatattttaaatgtctccaggctatttcaccaggttatcatttgatgctaaccttctgacacatgcagtggagttgttgtgcagcaggagtatgctgatatgaaagtgaatgctaaggataatttattcgcttaatctattaatttgctggaaacatttaaggaatgaatatcctgaataaaccatcataatttttagacagtggatgtggaggaaatatgttgccaggatgctgcaaaaatggaattgttatcagtaaaatacctgttatgcaagcagggttaaaagaggtcatgaggactcacttccctgaatatgaaataatatccagcgcctctgcggaggaccttaccttattacaattacgtcgttccggattagtcattgctgatttagccggtgaaagtgaagatccacgttctgtttgtgaacattattattctttaatcagtcaatatcgggaaattcactgggttttcatggtgagtcgctcctggtattcccaggcagtagaactgctcatgtgccctacggcgacgttattgtctgatgttgaacccattgagaatctggtcaagaccgtacgttccggcaatacgcacgcagagcgtatcagcgccatgctgacctccccggcaatgactgaaactcatgattttagctatcgctccgtcattctcactcttagtgagcgcaaggtactgcggctattaggtaaaggatggggcatcaaccagatagctagtttgcttaagaaaagtaataaaactatcagcgcccaaaaaaacagtgcgatgcgtcgactggcaattcacagcaacgctgaaatgtatgcatggataaatagcgcgcagggtgcaagagaacttaacttgccttctgtttatggagatgccgcagaatggaacacagccgaattaagaagagaaatgagccacagttaaaaaaatgcgtcatgagtagtatcggtattgagagtttattcagaaagtttgcgggtaacccttataagctccatacctataccagtcaggagagttttcaggatgccatgagccggatcagctttgcggcggtcattttttctttttctgccatgagaagtgagcgcagagagggattatcttgcctgactgaactggcgattaagtttccgcgtacccggcgtttagttattgcggatgatgatattgaagctcggctgattggtagtttgagcccaagtccgctggacggtgtattaagtaaagcgagtacgctggagatttttcatcaggaactctttttgagtttaaatggtgtacgtcaggcgaccgaccgactgaacaatcagtggtacattaaccaaagccggacgttaagcccgacggagagagaaatattgcgctttatgagccgtggctacagtatgacacaaattgccgagcagcttaaacgcaatatcaaaacgatccgtgcacataaatttaatgtgatgagcaaactgggcgtcagttctgacgcagggttgttggaggccgcagatattctgttatgtatgcggcattgcgaaacaagtaatgtgttgcatccctattaatccgcatgatgccgggtttacttccccggcagtgctttcatttcagcgtacaatcgccacattgctgcacatccggtaagcgataacgctggcagcaagtgcggcgcaccagcaggccgtcgcgcagtaccacggtacgccagagtggattatcttcaccgttcgtgagcgttttctcaaaaaagagggcatggcgcaggctttcaacagtagcctcgccgagcagttgcttcatctcagtgagataccagttgatcaaataaccggtattactccagataagtttgccgttgatctctccggtcgcttctagtgcttgcacaaccggaaccagcgcctggctgattaacgtttccattcgatgctgcgggctatgtggtgttgcgtttttatcttcacacacatcgacccagaaacaggcgacgcgtccggtttcgtgaaactcagcatggaaatgttccgggctcacatctaatgccttttcctgcgtcagtagcgccagcattaatggtggcaccatcaggccgatataccattgtgcccatagactgatcagcggtttgttctcgcggatcatcatcggttggttgcgatagatatgatcggaatagaccgccagcagagaacttagcacattcggactactccattgcgccagcgtcatggcgttaagtggggcaggttcatccaggcggataaactccagcaaatgttcacgatgttttgcgatcgtcgcccgcacggcttgcgcaagcgtgggatcctgcggctggagatgcgttcgccagatgacatcttcatagagcggtgcggaacgataggccataatcgggatagtaatctaaatgataatgattgctaatcatagcgataggtttacccgatagcaagggatttatctggcttgcaaatgataaaaattatcatatgatattggttatcattatcaatgaaagagatgaaatcatgttgcaacgtacgctgggcagtggctggggagtgttgctgccgggattgctgattgcggggctgatgtatgcggatttaagcagtgatcagtggcggattgtcattctgatgggattagtattgacgccgatgatgctgtatcacaaacagttgcggcattacattttgctaccaagctgcctggcacttattgctggcatcatgctgatgataatgaatttgaatcagggatgaaaaatcaaggaagaaacaagaaaggaagtaaagataattggtgcgaggggggggacttgaacccccacgtccgtaaggacactaacacctgaagctagcgcgtctaccaattccgccaccttcgcacagtcatcttactttttttgatatcgcctcgtttggtgcgaggggggggacttgaacccccacgtccgtaagaacactaacacctgaagctagcgcgtctaccaattccgccaccttcgcccagtgcgagcaatatcaacgtggtttttggtgcgaggggggggacttgaacccccacgtccgtaaggacactaacacctgaagctagcgcgtctaccaattccgccaccttcgcataccatcaattcttaaaaagaattgctaccacggaggcgcattctagtggttttcagcttttcgtcaatagttaattatcgacagaggtgtaattgctggaaaaatgtccatcaggaaactagcgtgcaggtttggtatgcatgcgggggcagatgccagatgcgacgctggcgcgtcttatctggcctacgaagggctaacgtgcaggttttgtaggtcggataaggcgttcacgccgcatccgacacggtattcggcgagataattaacctttcttcgcctggcgggtcataatggcgcgatacaccttgaagcgccctgtttgcgcgatcacttcgtggaagccaaatgtctcatccagcacgtccggataaggcaggaaggcgttcgctacaattcgcagctcgccgccgctattaagatgacgcaccgcaccgcgaatcagcgtttgcgccgcatccaggctggtttgcatcccatcgtggaacggcgggttggagatgatcatatcaaaacgacctttcacctcggaaaagacgttgctggcaaagacttcaccttcaacaccgttggccgcaagtgttgcgcggctggcttctaccgccggggcagagacatcgcacaaggtgagacgaattttcgggctatggcgcgcaaaggcaacactaagcacgcccgcgccacagccgacatccagcactttacctttcgtgtgcggagttaacgtgctgagcagcaactggctaccgacatccagaccgtcgcggctaaacacgccaggcagcgttttgaccgtcaggccatcgacgctgtattcgccccagaatttctccgcatcaaataccggctgtttttccagacgaccaaaatagaggccacagcgacgagcgctgtcgactttattcaacggcgcataatctgccagcatctgctcggcgctgcgcacgccgctgcggttctcgccaacgacaaaaatatctgtccccactggcagcagagaaagtaaattcatcaactggaactgggcttccggtttgttcttcggccagtagtaaatcagcgtatcgcaatctgcgacgtcatccgccgtggcgaccagactgaaacgggcgttatcccccatctggcggcttaatacctgccagtggtggaattgctgggtatgagcacggctggccgcggtatctaaacgcgcgggcaggtcatcctgtaagtctccggcaaacagaatacggctttgttcgaaatcatcactgtgacgcagcaagacttcacttgccggggtaaatgcagacatggaatgctcctcaattgatactggcggcgattatagccatatgttggcgcggtatcgacgaatttgctatatttgcgcccctgacaacaggagcgattcgctatgacatcccgacgagactggcagttacagcaactgggcattacccagtggagcctgcgtcgccctggcgcgttgcagggggagattgccattgcgatcccggcacacgtccgtctggtgatggtggcaaacgatcttcccgccctgactgatcctttagtgagcgatgttctgcgcgcattaaccgtcagccccgaccaggtgctgcaactgacgccagaaaaaatcgcgatgctgccgcaaggcagtcactgcaacagttggcggttgggtactgacgaaccgctaagtctggaaggcgctcaggtggcaagtccggcgctcaccgatttacgggcaaacccaacggcacgcgccgcgttatggcaacaaatttgcacatatgaacacgatttcttccctcgaaacgactgatttaccggcggcttaccacattgaacaacgcgcccacgcctttccgtggagtgaaaaaacgtttgccagcaaccagggcgagcgttatctcaactttcagttaacgcaaaacggcaaaatggcggcgtttgcgattacgcaagtggtgctggatgaagctacattgttcaatattgcggtcgatcctgactatcagcgtcagggattgggaagggcgctgctggaacatctgatcgacgaactggaaaaacgcggcgtggcgacactatggctggaagtccgtgctagtaacgctgccgccattgccctgtacgaaagtttaggctttaacgaggcgacgattcgccgcaattactaccccaccacggacggtcgcgaagacgccatcatcatggcgttgccaatcagtatgtaatacaaggtggaataatgaagtgggactggattttctttgatgccgatgaaacgctgtttacctttgacagtttcaccggcctgcagcggatgtttcttgattacagcgtcacctttaccgctgaagattttcaggactatcaggccgttaacaagccactgtgggtggattatcaaaacggcgcgatcactagtttacagcttcagcacgggcggtttgagagctgggccgaacggctgaacgtcgagccaggtaaactcaacgaagcctttattaatgcgatggcggaaatctgcacgccgctgccgggcgcggtttctctgcttaacgccattcgtggcaacgccaaaatcggcatcatcaccaacggctttagtgccttgcaacaggtgcgtctggaacgcacgggcctgcgtgattacttcgatttgctggtgatttccgaagaagttggcgttgccaaaccgaataagaaaattttcgattatgcgctggaacaggcgggcaatcctgaccgtagtcgcgtgctgatggttggcgacactgccgagtccgatattctcggtggcatcaacgccgggcttgcgacctgctggctgaatgcacaccatcgcgagcaaccagaaggcatcgcgcccacctggaccgtttctagcttgcacgaactggagcagctcctgtgtaaacactgattgcctcccccccgttgatgggtaaaatagccgcaatttttcgttttcaacaagcgcggcgcgatgccgcttactcaagaagaaagaattatgacgttgtctccttatttgcaagaggtggcgaagcgccgcacttttgccattatttctcacccggacgccggtaagactaccatcaccgagaaggtgctgctgttcggacaggccattcagaccgccggtacagtaaaaggccgtggttccaaccagcacgctaagagcgactggatggagatggaaaagcagcgtgggatctccattactacgtctgtgatgcagtttccgtatcacgattgcctggttaacctgctcgacaccccggggcacgaagacttcagcgaagatacctatcgtaccctgacggcggtggactgctgcctgatggttatcgacgccgcaaaaggtgttgaagatcgtacccgtaagctgatggaagttacccgtctgcgcgacacgccgatcctcacctttatgaacaaacttgaccgtgatatccgcgacccgatggagctgctcgatgaagttgagaacgagctgaaaatcggctgtgcgccgatcacctggccgattggctgcggcaagctgtttaaaggcgtttaccacctttataaagacgaaacctatctctatcagagcggtaaaggccacaccattcaggaagtccgcattgttaaagggctgaataacccggatctcgatgctgcggttggtgaagatctggcacagcagctgcgtgacgaactggaactggtgaaaggcgcgtctaacgagttcgacaaagagctgttccttgcgggcgaaatcactccggtattcttcggtactgcgctgggtaacttcggcgtcgatcatatgttggatggcctggtggagtgggcacctgcgccgatgccgcgtcagactgatacccgtaccgtagaagcgagcgaagataaatttaccggcttcgtatttaaaattcaggccaacatggacccgaaacaccgcgaccgcgtggcgtttatgcgtgtggtgtccggtaaatatgaaaaaggcatgaaactgcgccaggtgcgcactgcgaaagatgtggtgatctccgacgcgctgacctttatggcgggtgaccgtagccacgttgaagaagcgtatccgggcgatatcctcggcctgcacaaccacggcaccattcagatcggcgacacctttacccagggtgagatgatgaagttcaccggtattccgaacttcgcaccagaactgttccgtcgtatccgcctgaaagatccgctgaagcaaaaacagctgctcaaagggctggtacagctttccgaagagggcgcggtgcaggtgttccgtccaatctccaacaacgatctgatcgttggtgcagttggtgtgctgcagtttgatgtggtggtagcgcgcctgaagagcgaatacaacgttgaagcagtgtatgagagtgtcaacgttgccactgcccgctgggtagaatgtgcagacgcgaagaaattcgaagagttcaagcgtaagaacgaaagccaactggcgcttgatggcggcgataacctcgcttacatcgctaccagcatggtcaacctgcgcctggcacaggaacgttatccggacgttcagttccaccagacccgcgagcattaattcttgcctccagggcgcggtagccgctgcgccctgtcaatttcccttccttattagccgcttacggaatgttcttaaaacattcacttttgcttatgttttcgctgatatcccgagcggtttcaaaattgtgatctatatttaacaaagtgatgacatttctgacggcgttaaataccgttcaatgcgtagatatcagtatctaaagccgtcgattgtcattctaccgatattaataactgattcagaggctgtaatggtcgttattcatcactcatcgcttttgtgatggcgaccattgacttctgtagagggtgaagtctctccctattcagcaatgcaacctcgtgttgccaggctcaaattacgagcaaacatacaggaataaatcgatgactatgacaagactgaagattagcaaaactctgctggctgtaatgttgacctctgccgtcgcgaccggctctgcctacgcggaaaacaacgcgcagactaccaatgaaagcgcagggcaaaaagtcgatagctctatgaataaagtcggtaatttcatggatgacagcgccatcaccgcgaaagtgaaggcggccctggtggatcatgacaacatcaagagcaccgatatctctgtaaaaaccgatcaaaaagtcgtgaccctgagcggtttcgttgaaagccaggcccaggccgaagaggcagtgaaagtggcgaaaggcgttgaaggggtgacctctgtcagcgacaaactgcacgttcgcgacgctaaagaaggcagcgtgaagggctacgcgggtgacaccgccaccaccagtgaaatcaaagccaaactgctggcggacgatatcgtcccttcccgtcatgtgaaagttgaaaccaccgacggcgtggttcagctctccggtaccgtcgattctcaggcacaaagtgaccgtgctgaaagtatcgccaaagcggtagatggtgtgaaaagcgttaaaaatgatctgaaaactaagtaattcgtcgtaattcgtcctcccgaactttgtcgggaggcgcgatgtgcaccacactaaaaatatcgcattgagtgattttcacgctcatatcaagcggtgacattaactatggtaaaggagacgcttatgtttcgttggggcatcatatttctggttatcgcgttaatcgccgccgcacttgggtttggtggtctggccggtaccgctgcaggcgcagctaaaattgtctttgtcgtcgggattattctgttcctggtgagtttgttcatgggccgaaaacgaccctaaatttcagaccattaagaaaattttatccaaagccagtccagcggactggcttttgcggttttagcgaataataaattgcgttactttgtcattctttcacaacaaaaacaggaaggcagaggtggggcagcgaatacctgtaacgcttggtaatattgcgccgttgagcctaaggccgttccagcctggacgaatagctctggtgtgcgaaggcggcggacagcgtggaattttcacggctggcgtgctggatgagtttatgcgcgcgcagtttaatcctttcgatctttatctcggcacatctgccggggcgcagaacctcagcgcgtttatctgcaatcagcccggttacgcgcgcaaagtcatcatgcgctataccacaaaacgcgaatttttcgatccattgcgctttgtccgtggaggaaatcttatcgatctcgactggctggtggaggccactgcaagccagatgccgttgcaaatggataccgccgcgcggttgtttgacagcggcaaaagcttttatatgtgcgcctgtcgtcaggatgactacgcgccgaattactttttaccaaccaaacaaaactggctggatgtgattcgcgcctccagtgcgatacctggcttttatcgtagcggagtgagcctggaaggcattaactacctggatggcgggatcagtgatgcgattccggttaaagaggcggcaaggcagggcgctaaaacgttggtcgtcattcgcactgtgccgagtcaaatgtactacacgccgcagtggttcaaacgcatggaacgctggctgggtgacagtagcctgcagccgctggtcaatctggtgcagcatcatgaaaccagctatcgtgacattcagcaatttattgagaaaccaccgggcaagctgcggatattcgaaatttatccgccgaagccattacatagtatcgcgcttggcagtcggattccggcgctgcgtgaagactataaacttgggcgtttatgcggtcgttatttcctcgccacggttggcaagctattaactgaaaaagcgccgcttacccgccatctggtgccagtggtgacgccggaaagcattgtcattccgcctgcgccagtcgccaacgatacgctggttgccgaagtgagcgacgctccgcaggcgaacgacccgacatttaacaatgaggatctggcttgatttgccgttttatcgacacccactgccattttgatttcccgccgtttagtggcgatgaagaggccagcctgcaacgcgcggcacaagcgggcgtaggcaagatcattgttccggcaacagaggcggaaaattttgcccgtgtgttggcattagcggaaaattatcaaccgctgtatgccgcattgggcttgcatcctggtatgttggaaaaacatagcgatgtgtctcttgagcagctacagcaggcgctggaaaggcgtccggcgaaggtggtggcggtgggggagatcggtctggatctctttggcgacgatccgcaatttgagaggcagcagtggttactcgacgaacaactgaaactggcgaaacgctacgatctgccggtgatcctgcatagtcggcgcacgcacgacaaactggcgatgcatcttaaacgccacgatttaccgcgcactggcgtggttcacggtttttccggcagcctgcaacaggccgaacggtttgtacagctgggctacaaaattggcgtaggcggtactatcacctatccacgcgccagtaaaacccgcgatgtcatcgcaaaattaccgctggcaagcttattgctggaaaccgacgcgccggatatgccgctcaacggttttcaggggcagcctaaccgcccggagcaggctgcccgtgtgttcgccgtgctttgcgagttgcgccgggaaccggcggatgagattgcgcaagcgttgcttaataacacgtatacgttgtttaacgtgccgtaagccggataaggcgttcacgccgcatccggcagttggcgcacaatgcctgatgcgacgcttaacgcgtcttatcatgcctacaggtttgtgccgaaccgtaggccggataaggcgttcacgccgcatccggcagttggcgcacaatgcctgatgcgacgcttgtcgcgtcttatcatgcctacaagtctgtgccgaaccgtaggccggataaggcgttcacgccgcatccggcagtcggcgcataatgcctgatgcgacgcttgtcgcgtcttatcatgcctacaggtttgtgccgaaccgtaggccggataaggcgttcgcgccgcatccggcagttggcgcacaatgcctgatgcgacgcttgacgcgtcttatcaggcctacaagtctgtgccgaaccgtaggccgtatccggcatgtcacaaatagagcgccggaaatatcaaccggctcaccccgcgcacctttaacgcatcagccaacggctcaacgtcttccggcgtggcgctcgcccagctttgcgcctcgccatacacgccgtgggcatgaaacgcgttcaggcgtaccggaacatcgccgagtcccttgataaacgccgccagttcttcgatgtgttgcaaataatccacctggccagggatcaccagcaaacgcagttccgccagcttgccgcgctctgccagcaaatagatgctgcgcttaatctgctgattatcgcgtccggtgagttgttgatgacattcgctcccccacgctttgagatcgagcattgcgccgtcgcacaccgggagcaatttttcccagccggtttcgctcaacatgccgttactgtccaccagacaggtgagatggcgcagttgcggatcgtttttgatagcagtaaacagcgccaccacaaacggcagctgggtcgtggcttcaccgccactcaccgttatcccttcgataaacagcactgctttgcggacatggctaagcacttcgtccacgctcatggattgcgccatgggcgtggcatgttgcggacacctcttcaggcaggtatcacactgctcgcaaaccacagcgttccacaccactttgccgtcaacaatctgcaacgcctgatgcggacactgtggcacgcactccccacagtcattgcaacgtcccatcgtccacggattgtgacagtttttgcagcgcagattgcagccctgcaaaaacagagccagacgactgcctggcccgtcaacgcaggagaaggggataatcttactgactaaagcgcatctgctgttcatggcttatcacgcgcggctggcgttccagaatacgagtgttgcgtgcggcttcttcgcccagccaggtggtgttggtgcgactaccttcggcgcgatatttttctaaatcgctcaaacgcaccatataaccggtaacgcgaaccagatcgttaccgctgacattggcggtaaattcacgcattccggctttaaaggcaccgaggcaaagctgtaccagtgcctgcgggttacgtttgatggtttcgtcgagcgtcagaatgtcgctgatgccggaataataataagcatgatgcggggcgacagtttgcagatgggtgatcggatctggctcatcgccatacggcaaacgcgcgcccggcgtggtgccgatatcggaactgatcccgctctgtgcgtgtaacatggcgcgtttttgccagccatatttcacgggggtattggcgacaaactccgccagttgcgcgctgatgcgataacctacttcatttgcggcggcttctttaccgtagcgcgcggcaatcccttctttttcacacagcaagttaaccgcttccgccagcccatacatgccaaacattggcacaaaacgttcagggttaatcagcccttctttcaccaggaagctattctcaaagaagtgactttgttgatagaggaattcacaccgcgcatcgatgatggcgatctgctgctggcagtagtgcggtagagtgcgcgtaaagaagtcatccaggctttcgctgcgctcggcaatggctttcaggttaaggcgtaccagcgtgctgccaccacccgccagcggcagactgttgtaacagctcacaatcccgtagcccccttttgtgaaaattttatcatgcaccggaccgttggcgatgtgcggtttgctacattcacagatgttcttcgccacttccagcagcaggtcatcaggggtgatttcaggatcgtagataaaggtcaggttcggactaacctgcttcaactctgcatctgcacgtaagatcgcgcgggtaatggggctatcagacgggccgatattggcgtgcataaaggcgtctggcagggttctgtcgaggtaacgccagaaacgttttattcgaacatcgatctcgtcttgtgttagaattctaacatacggttgcaacaacgcatccagttgccccaggtagaccggcatgcttgtgacgctcggtacgtggtggtaaagaatggtcagcagagagagtgcgtcatcaagatctttcgcgccttccagctccagccattcggaaccgttcgccagaaaacgggcgtaatcgggtaagacatagcgcggtttgtacggcgcatgaccttcaaacatatcgcagattacaccttcatccagcgcgcggcgggcttcggcaggaagctgtgggtaaggcagattgttttctgcttccagtgccagaaaatggcgcttctgctccgggctaagcactgggctggtgacaatttgctggcaacgttgttgcagtgcattttcatgagaagtgggcatcttcttttccttttatgccgaaggtgatgcgccattgtaagaagtttcgtgatgttcactttgatcctgatgcgtttgccaccactgacgcattcatttgaaagtgaattatttgaaccagatcgcattacagtgatgcaaacttgtaagtagatttccttaattgtgatgtgtatcgaagtgtgttgcggagtagatgttagaatactaacaaactcgcaaggtgaattttattggcgacaagccaggagaatgaaatgactgatctgaaagcaagcagcctgcgtgcactgaaattgatggacctgaccaccctgaatgacgacgacaccgacgagaaagtgatcgccctgtgtcatcaggccaaaactccggtcggcaataccgccgctatctgtatctatcctcgctttatcccgattgctcgcaaaactctgaaagagcagggcaccccggaaatccgtatcgctacggtaaccaacttcccacacggtaacgacgacatcgacatcgcgctggcagaaacccgtgcggcaatcgcctacggtgctgatgaagttgacgttgtgttcccgtaccgcgcgctgatggcgggtaacgagcaggttggttttgacctggtgaaagcctgtaaagaggcttgcgcggcagcgaatgtactgctgaaagtgatcatcgaaaccggcgaactgaaagacgaagcgctgatccgtaaagcgtctgaaatctccatcaaagcgggtgcggacttcatcaaaacctctaccggtaaagtggctgtgaacgcgacgccggaaagcgcgcgcatcatgatggaagtgatccgtgatatgggcgtagaaaaaaccgttggtttcaaaccggcgggcggcgtgcgtactgcggaagatgcgcagaaatatctcgccattgcagatgaactgttcggtgctgactgggcagatgcgcgtcactaccgctttggcgcttccagcctgctggcaagcctgctgaaagcgctgggtcacggcgacggtaagagcgccagcagctactaagtaagatgctttacgcctgatgcgctgcgcttatcaggcctacgagacgtatctacccgtaggccggataaggcgtagacgcatccggcaaaagccgcctcatactcttttcctcgggaggttaccttgtttctcgcacaagaaattattcgtaaaaaacgtgatggtcatgcgctgagcgatgaagaaattcgtttctttatcaacggtattcgcgacaacactatctccgaagggcagattgccgccctcgcgatgaccattttcttccacgatatgacaatgcctgagcgtgtcagcctgaccatggcgatgcgagatagtggaaccgttctcgactggaaaagcctgcatctgaatggcccgattgttgataaacactccaccggtggcgtcggcgatgtgactagcctgatgttggggccgatggtcgcagcctgcggcggctatattccgatgatctctggtcgcggcctcggtcatactggcggtacgctcgacaaactggaatccatccctggcttcgacattttcccggatgacaaccgtttccgcgaaattattaaagacgtcggcgtggcgattatcggtcagaccagtagtctggctccggctgataaacgtttctacgcgacccgtgatattaccgcaaccgtggactccatcccgctgatcaccgcctctattctggcgaagaaacttgcggaaggtctggacgcgctggtgatggacgtgaaagtgggtagcggcgcgtttatgccgacctacgaactctctgaagcccttgccgaagcgattgttggcgtggctaacggcgctggcgtgcgcaccaccgcgctgctcaccgacatgaatcaggtactggcctccagtgcaggtaacgcggttgaagttcgtgaagcggtgcagttcctgacgggtgaatatcgtaacccgcgtctgtttgatgtcacgatggcgctgtgcgtggagatgctgatctccggcaaactggcgaaagatgacgccgaagcgcgcgcgaaattgcaggcggtgctggacaacggtaaagcggcagaagtctttggtcgtatggtagcggcacaaaaaggcccgaccgacttcgttgagaactacgcgaagtatctgccgacagcgatgctgacgaaagcagtctatgctgataccgaaggttttgtcagtgaaatggatacccgcgcgctggggatggcagtggttgcaatgggcggcggacgccgtcaggcatctgacaccatcgattacagcgtcggctttactgatatggcgcgtctgggcgaccaggtagacggtcagcgtccgctggcggttatccacgcgaaagacgaaaacaactggcaggaagcggcgaaagcggtgaaagcggcaattaaacttgccgataaagcaccggaaagcacaccaactgtctatcgccgtatcagcgaataacggtatactgatctgatcatttaaatttgaagcactgagtacggagaacatatgaaacgtgcatttattatggtgctggacagtttcggcatcggcgctacagaagatgcagaacgctttggtgacgtcggggctgacaccctgggtcatatcgcagaagcttgtgccaaaggcgaagctgataacggtcgtaaaggcccgctcaatctgccaaatctgacccgtctggggctggcgaaagcacacgaaggttctaccggtttcattccggcgggaatggacggcaacgctgaagttatcggcgcgtacgcatgggcgcacgaaatgagttccggtaaagataccccgtctggtcactgggaaattgccggtgtcccggttctgtttgagtggggatatttctccgatcacgaaaacagcttcccgcaagagctgctggataaactggtcgaacgcgctaatctgccgggttacctcggtaactgccactcttccggtacggtcattctggatcaactgggcgaagagcacatgaaaaccggcaagccgattttctatacctccgctgactccgtgttccagattgcctgccatgaagaaactttcggtctggataaactctacgaactgtgcgaaatcgcccgtgaagagctgaccaacggcggctacaatatcggtcgtgttatcgctcgtccgtttatcggcgacaaagccggtaacttccagcgtaccggtaaccgtcacgacctggctgttgagccgccagcaccgaccgtgctgcagaaactggttgatgaaaaacacggccaggtggtttctgtcggtaaaattgcggacatctacgccaactgcggtatcaccaaaaaagtgaaagcgactggcctggacgcgctgtttgacgccaccatcaaagagatgaaagaagcgggtgataacaccatcgtcttcaccaacttcgttgacttcgactcttcctggggccaccgtcgcgacgtcgccggttatgccgcgggtctggaactgttcgaccgccgtctgccggagctgatgtctctgctgcgcgatgacgacatcctgatcctcaccgctgaccacggttgcgatccgacctggaccggtactgaccacacgcgtgaacacattccggtactggtatatggcccgaaagtaaaaccgggcagtctgggtcatcgtgaaaccttcgcggatatcggccagactctggcaaaatattttggtacttctgatatggaatatggcaaagccatgttctgatggatttgggcggagcgttgactccgcctttgttatgtcacaaaaaggataaaacaatggctaccccacacattaatgcagaaatgggcgatttcgctgacgtagttttgatgccaggcgacccgctgcgtgcgaagtatattgctgaaactttccttgaagatgcccgtgaagtgaacaacgttcgcggtatgctgggcttcaccggtacttacaaaggccgcaaaatttccgtaatgggtcacggtatgggtatcccgtcctgctccatctacaccaaagaactgatcaccgatttcggcgtgaagaaaattatccgcgtgggttcctgtggcgcagttctgccgcacgtaaaactgcgcgacgtcgttatcggtatgggtgcctgcaccgattccaaagttaaccgcatccgttttaaagaccatgactttgccgctatcgctgacttcgacatggtgcgtaacgcagtagatgcagctaaagcactgggtattgatgctcgcgtgggtaacctgttctccgctgacctgttctactctccggacggcgaaatgttcgacgtgatggaaaaatacggcattctcggcgtggaaatggaagcggctggtatctacggcgtcgctgcagaatttggcgcgaaagccctgaccatctgcaccgtatctgaccacatccgcactcacgagcagaccactgccgctgagcgtcagactaccttcaacgacatgatcaaaatcgcactggaatccgttctgctgggcgataaagagtaattgtgtttcgctgcaaggcgattgccttgtgaagccggagcgggagactgctccggctttttagtatctattcatttttctctccagcttgaatattttcgctatacttttcagtgaaatgtgttaataaatctattcaagtatctattcacgaatctattcattaatgagcgagctgactgatcttttactgcaagggccgcgttctgccccggaattgcgccagcgtctggcaatcagtcaggcgacgttcagtcgccttgttgccagagaagatcgggtgattcgctttggtaaagcacgggcaacgcgatatgcactgctgcgtccttatcgcggaattgagcgtattcccgtctggcgggtggacgataccggaaaggcgcataaattcgccgacatccggttgtgctggccgcagggaagttgtctggtaacaggcgcagatggcgacgaacagtggtttgatggtttgccctggtatttgaccgatctccgaccgcagggctttttagggcgcgcgtggggcaggaagttagccgcgcaactgaatctgactgatgatatacgtctctggcaggaagaagatgtgctctacgccctgaccgtatttaacggtgaatatactggcggttggttggtcggggaggggaattatcagcgatggattactgcacaacaccctgcggaaattcctctggatcaaaaactcacccattacgaacagctggcaagtgatgcactggcaggagaaattgtgggttcttctgcgggcggcgagcagccaaaatttacctactatgcacaaacgccgagtggcaataaacatgtgttggtgaaattcaccgtaccacagcaaaccgcggtcagccaacgttggggtgacctgctaattgctgaatctattgccgcgcaaatcctgcgtgacggtgggatccacgccatcgagagtacggtgcttgtaacaagtaacaggcaggtattcctcgaagcggaacgctttgactgcaaaggtaacgatggtcgcttgcctattgtgagcctggaggcggtgcagagtgagtttatctcttctccgggaagctggccgcaggcaatgcgccgtttgtgtgagcaacaacttgtcactcaccagagcgtggcgcaaacagaagtgatctgggcatttgggcgacttatcgccaacagcgatatgcacgcaggtaatttaagcttttatttatctgaaccgccatttgcgctgacgcccgtctacgacatgctgccgatggtctatgcaccaaacagcgctggaatgctgcgtgatgctgccattgaggtgaagtttgatcttaacgtcagtaaaagcgcttggttaacggcgatcccgctggcgcagcagttctggcaaacggtcgccagagatccgcgtatcagcgaggcgtttcgccacattgcgcaagaaatgccggaaaaaatccggcaaatcgaagagaaagttgcccgcatgggcgggtaattaccttacagcccccgccatccatgcgcttaactcccgtagctctttttcctgttccgggaagtcaaccaacagcgcttcgcactcctgttgcagcatatctgcgcggtacaggcagccttgcagtcgtccggcgagggcttccagcggcgcggggttgaggctgtcggtaaacacctgggcgcgggtgatatggcctttttcaacgtcgaaatgcagttccacgccgccccaggtaaagcgttcatccagcagatggctgaatgccggagcctgaccgaagttccattcccagctactctggcgggcaaaggtttcggcgaagtttggcaagtctggcgttttgttcggggagatgatttccgcttccacgcgctcgccataatgggcgaaaaaggcctcggttatggcctcgcaaacctgctcatgggtgatccccggcaacagctcggtgaggttggtcacgcgggaacgtacgctcgtaatgcctttcgccgccagtttctttttatccggattgagatagtttgccaggcggctgaggtcggcattgagtagcaaggtgccgtggtggaagccgcgatctttggtttcgcgataggcgctgccactgactttgcggtcgccttcgacggttttcaccaccagatcgttacgtccggacgcttcggcgctgacgccgagcgcgttcagcgcattgagcacaatgctcgtggagatagttttatcgtactccggcttgccagccataaaggtaaagcaggtattgccgagatcgtggaacaccgcgccgccaccgctactgcgccgcgccaggcggacgttatcttcttccatccgccgggtattacactctttccacgggttctgcgcgcgaccaattactaccgtgtcggcattgcgccagagaaacagaacgcgctgcgtggcgggcatttggcgaaaaatacactcttccaccgccaggttaaaccacgggtcgtaagagtcagagatgagcaggcgtaatgtggacataacgatttcctttcttgtagtaatgggtcactcttttttctcgctttcttcctcttccggcaccggtttgctggcggctaacaggaaggggctttgctgccagcgggtgcgtttaccctgtagcagcgtgcgggtcagcactacaccgattgccagactgagcagcaacatcaggcgtaaaatgttagtggtgttatccacctgttgggcttcggtggcgagcgtatgggtgtcgagtgtcaggcgcagatagccgagcggtccgtttttacccgcaattggctcgacaatctgctggttaaaatagccgcctgcttttttaccgtcgagcgccagccggtcgcgcacttcgacgctttcgccagaacgtgcgataagatcgccttgttcgtcatacacacccgcgtcgaggatacggctttcatccgttaactgatcgaggatcgcctgaatgcgtttttcatccggactgtcggtacgcatcagcggtgcaacgttcagcgtcacctgacgcgccagggtgcgggccagttcttccagctgtggattacgctgtcgctggtggttttgactaaaccaactcgctccctgcatcagcgccactaacaaggcaagacagaacaggacaatcactgcccgatgcagccggaatttcagttttgtgcgagccatcttccaccctttgaaaatttgagacttaatgttgccagaagcaatggatacaaggtagcctcatgcgttattttccctgcttcgaacgattttacaggagccttaatgcctaacattacctggtgcgacctgcctgaagatgtctctttatggccgggtctgcctcttagtttaagtggtgatgaagtgatgccactggattaccacgcaggtcgtagcggctggctgctgtatggtcgtgggctggataaacaacgtctgacccaataccagagcaaactgggtgcggcgatggtgattgttgccgcctggtgcgtggaagattatcaggtgattcgtctggcaggtagtctcaccgcacgggctacacgcctggcccacgaagcgcagctggatgtcgccccgctggggaaaatcccgcacctgcgcacgccgggtttgctggtgatggatatggactccaccgccatccagattgaatgtattgatgaaattgccaaactggccggaacgggcgagatggtggcggaagtaaccgaacgggcgatgcgcggcgaactcgattttaccgccagcctgcgcagccgtgtggcgacgctgaaaggcgctgacgccaatattctgcaacaggtgcgtgaaaatctgccgctgatgccaggcttaacgcaactggtgctcaagctggaaacgctgggctggaaagtggcgattgcctccggcggctttactttctttgctgaatacctgcgcgacaagctgcgcctgaccgccgtggtagccaatgaactggagatcatggacggtaaatttaccggcaatgtgatcggcgacatcgtagacgcgcagtacaaagcgaaaactctgactcgcctcgcgcaggagtatgaaatcccgctggcgcagaccgtggcgattggcgatggagccaatgacctgccgatgatcaaagcggcagggctggggattgcctaccatgccaagccaaaagtgaatgaaaaggcggaagtcaccatccgtcacgctgacctgatgggggtattctgcatcctcagtggcagcctgaatcagaagtaattgctcgcccgccatcctgcgggcggcacagcattaacgaggtacaccgtggcaaaagctccaaaacgcgcctttgtttgtaatgaatgcggggccgattatccgcgctggcaggggcagtgcagtgcctgtcatgcctggaacaccatcaccgaggtgcgtcttgctgcgagcccaatggtggcgcgtaacgagcgtctcagcggctatgccggtagcgccggggtggcaaaagtccagaaactctccgatatcagccttgaagagctgccgcgtttttccaccggatttaaagagttcgaccgcgtactaggcggcggcgtggtgccaggaagtgccattctgattggcggtaaccctggtgcggggaaatccacgctgctactgcaaacgctgtgcaaactggcccagcagatgaaaacgctgtatgtcaccggcgaagagagcctgcaacaggtggcaatgcgcgctcatcgccttggcctgccgactgacaatctcaatatgttgagcgaaaccagcatcgaacagatctgcctgattgccgaagaagagcaaccgaagctgatggtaattgacagcatccaggtgatgcatatggcggatgtacagagtagccctggtagcgtggcgcaggtgcgtgaaacggcggcttatttgacacgcttcgccaaaacgcgcggtgtggcgattgtcatggtggggcacgtaaccaaagatggtagcctggctggcccgaaagtgctggaacactgtatcgactgtagcgtgcttttggatggcgatgccgactcccgttttcgcaccttgcgcagccataaaaaccgcttcggcgcggtgaatgagctgggcgtcttcgcgatgaccgaacaggggctgcgtgaagtcagcaaccctagcgcaattttcttaagtcgcggcgatgaagtgacctccggtagcagtgtgatggtggtatgggaaggaacgcgtccactgctggtggagattcaggcgctggtcgatcacagcatgatggcgaacccacgccgcgtggcagtggggctggaacaaaaccgtctggcaatcctgctggctgtgttgcaccgtcacggtggtctgcaaatggccgatcaggatgtgtttgtgaacgtggtcggcggcgtgaaggtaaccgaaaccagtgccgacttagcgttactgctggcgatggtttccagcctgcgcgacagaccgctgccgcaggatctggtggtgtttggtgaagtcgggctggcaggggagatccgcccggtgcccagcggtcaggaacgaatctctgaagcggcgaaacacggttttcgccgggcgattgttccggcggctaacgtgccgaaaaaagcgccggaagggatgcagatttttggcgttaaaaaactctccgacgcgcttagcgtgttcgacgacttataatgagatatacggagggagatatgagcagttttgattacctgaaaactgccatcaagcaacagggctgcacgctacagcaggtagctgatgccagcggtatgaccaaagggtatttaagccagttactgaatgccaaaatcaaaagccccagcgcgcaaaagctggaggcgttgcaccgttttttggggcttgagtttccccggcagaagaaaacgatcggtgtcgtattcggtaagttctacccactgcataccggacatatctaccttatccagcgcgcctgtagccaggttgacgagctgcatatcattatgggttttgacgatacccgtgaccgcgcgttgttcgaagacagtgccatgagccagcagccgaccgtgccggatcgtctgcgttggttattgcaaacttttaaatatcagaaaaatattcgcattcatgctttcaacgaagagggcatggagccgtatccgcacggctgggatgtgtggagcaacggcatcaaaaagtttatggctgaaaaagggatccagccggatctgatctacaccagcgaagaagccgatgcgccacagtatatggaacatctggggatcgagacggtgctggtcgatccgaaacgtacctttatgagtatcagcggtgcgcagatccgcgaaaacccgttccgctactgggaatatattcctaccgaagtgaagccgttttttgtgcgtaccgtggcgatccttggcggcgagagcagcggtaaatccaccctggtaaacaaacttgccaatatcttcaacaccaccagtgcgtgggaatatggccgcgattatgtctttagtcacctcggcggtgatgagatcgcattgcagtattctgactacgataaaatcgcgctgggccacgctcaatacattgattttgcggtgaaatatgccaataaagtggcatttatcgataccgattttgtcaccactcaggcgttctgcaaaaagtacgaagggcgggaacatccgttcgtgcaggcgctgattgatgaataccgtttcgatctggtgatcctgctggagaacaacacgccgtgggtggcggatggtttacgcagcctcggcagtagcgtggatcgcaaagagttccagaacttgctggtggagatgctcgaagagaacaatatcgaatttgtgcgggttgaagaggaagattacgacagtcgtttcctgcgctgcgtggaactggtgcgggagatgatgggggagcagagataaccgtgatgaaactgctcaaaggcgaggtataaaatgagtttttttgatgagttgaaaacctctctggaagaggctgtcgagattaaacaaggtttgaaaaaacctgcacgggtgacccgccacgaaattgaggatgctaaggctgttgtagaccggaaacggtgttcacgccgcatccggcattcggtgctcaatgcctgatgcgacgcttaccgcgtcttatcaggcctacagttttacaacgtattgaaattgctggttttgtaggccggataaggcgttcgcgccgcatccggcattttacgcattacttcgcaatacgcttgtacttgatacgcttcggctccagcgcgtctgcgcccagcgtgcgtttcttgtactcttcgtactcggtaaagttaccttcgaagaactcaactttaccttcatcctggtaatccagaatgtgcgtggcgatacggtcgaggaaccaacggtcgtggctgataaccatcgcacagcccgggaactccagcagggcgttttccagcgcgcgcagggtttcgatatccaggtcgttggttggttcgtcgagcagcagcatgttgccgccaacctgcagcagcttcgccagatgcagacgaccgcgctcaccaccggagagttcaccaacgcgtttaccctgatcaacccctttaaagttaaagcggccaacgtaggcgcggcttggcatctcggtgttgccgatcttcatgatatccagcccgccggaaacttcttcccaaacggttttgctgttatccatactgtcacggaactgatcaacgctcgccagtttcaccgtttcacccaaagtgatggtgccgctgtccggctgttcctgaccagagatcatacggaacagggtgcttttacccgcaccgttcggaccgatgatcccgacgatcgctcctttcgggatgctgaagctcaggtcatcaatcagcagacgatcgccataggatttacgcaggttgctgacttccagcactttatcgcccagacgcggtccaggtggaataaacagttcgttggtttcgttacgtttctgatattcggtgctgttcagttcttcaaagcgcgccagacgtgctttacctttgctctgacggcctttagtaccttgacgtacccattccagctctttctcaatgctcttacgacgcgccgcttcttgactagcttcctgcgccaggcgctgatctttctgctccagccaggaggagtagttaccttcccacggaataccttcaccgcggtcaagttcgaggatccagcctgcaacgttatcgaggaagtaacggtcgtgggtaatcgccacaacggtgccttcgaagtcgtgcaggaagcgttccagccaggccacggattcggcatccaggtggttggtcggttcgtcgagcagcagcatgtctggtttttccagcagcaggcggcacaacgctacgcgacgacgttcaccaccggagaggttagcgattttcgcgtcccagtccggcagacgtagcgcatccgccgcacgctccagctgtacgttcagattatgaccgtcgtgagcctgaatgatctcttccagacggccttgttcagcggccagcttgtcaaaatcggcatccggatcggcgtacagcgcatacacttcatccaggcgtttcagggcgttaaccacttcactaaccgcttcttcaatggactcacgcacggtgtgttccgggttcagctgcggttcctgcggcagataaccaatcttgatgtctggctgcggacgcgcttcaccttcgatgtctttatcaatgcccgccataatgcgcagcagggtggacttacccgcgccattcagacccaggacaccaatttttgccccagggaagaaactcagagagatgtttttcaaaatatgacgtttcggcggaacaactttgccgacacgatgcatggtataaacgaattgagccacgttggacttcgcctctatgtttatcgtgataatgagttttcaaaggcgaagtgtagcctttttccccgcctaatcccagccggtcgatcaccctcgcagtaaaagtaaaaaagtgtccgtaacgtggcgtaaacggcaatgactggttagcataaatctattacgcggcatgacgctgcattgatgtatttacacttagaggatgcgcttgtggaaaaagccaaacaagttacctggcggctgttggctgccggtgtctgtctgctgacggtcagcagcgtggcgcgagccgacagtctggatgagcagcgtagtcgttacgcgcaaatcaagcaggcctgggataatcgacaaatggatgtggtcgaacaaatgatgcctggactgaaggattatccgctttatccctacctggaataccgccagatcaccgatgatctgatgaatcaaccggcggtgacggtcactaactttgttcgcgctaaccccacgcttcctcccgctcgcacgctgcaatctcgtttcgtcaatgaactggcgcggcgtgaagactggcgtggcttgttagcctttagcccggaaaagcccggaactaccgaagcgcaatgtaattactactatgcgaaatggaacaccgggcagagtgaagaagcctggcaaggggcgaaagagctgtggctaaccggcaagagccagcctaacgcctgtgacaagttatttagcgtctggcgtgcgagtggtaaacaagatccgctggcgtatttagagcgtatccgtctggcgatgaaagcgggtaacacaggcctggtaacagtgctggcagggcagatgcctgccgattaccagactatcgccagcgcaatcattagtctggcgaacaaccctaatacggtactgaccttcgcgcgtacaactggcgcgaccgattttacccgtcaaatggcggcggtggcgtttgccagtgtggcgcggcaggatgctgagaatgcacggctgatgatcccaagccttgcccaggcgcagcagcttaatgaagatcagattcaggagctgcgcgatatcgtcgcctggcgtttgatgggcaacgatgtcaccgacgagcaggcgaaatggcgcgatgacgccattatgcgcagccaatctactagccttattgaacgccgtgtacgaatggcgcttggcaccggcgatcgtcgcggcctgaatacctggctggcgcgtctgcctatggaagcgaaagagaaagatgaatggcgttactggcaggcggatttattgctggaacgcggacgtgaagctgaagcaaaagagattttgcatcaactcatgcaacagcgtggtttctacccgatggttgcagcacaacgcatcggcgaagagtatgagctgaagattgataaagcgccgcagaatgttgacagcgccctgactcaggggccggagatggcgcgcgtgcgcgagttgatgtactggaatctcgataataccgcgcgtagcgagtgggccaatctggtgaagagcaagagtaaaacagagcaggctcaactggcgcggtatgctttcaacaaccaatggtgggatcttagcgttcaggcaacgatcgccgggaagctgtgggatcatctggaagagcgattcccgctggcttacaacgatcttttcaaacgctacaccagcggtaaggagatcccgcaaagctatgcgatggcgattgctcgtcaggagagcgcctggaatccgaaagtgaaaagtccggtaggggccagcggcttgatgcagattatgcctggtacagcgacccatacggtgaagatgttctctattcccggttatagcagtcctgggcaattgctggatccggaaacgaatatcaacattggcaccagttacctgcaatatgtttatcagcagtttggcaataatcgtattttctccagtgcagcttataacgccggaccagggcgggtgcgaacctggcttggcaacagcgccgggcgtatcgacgcagtggcatttgtcgagagtattccattctccgagacgcgcggttatgtgaagaacgtgctggcttatgacgcttactaccgctatttcatgggggataaaccgacgttgatgagcgccacggaatggggacgtcgttactgatccgcacgtttatgatatgctatcgtactctttagcgagtacaaccgggggaggcattttgcttcccccgctaacaatggcgacatattatggcccaacaaagtccctatagtgcagcgatggcagaacagcgtcaccaggagtggttacgttttgtcgacctgcttaagaatgcctaccaaaacgatctccatttaccgttgttaaacctgatgctgacgccagatgagcgcgaagcgttggggactcgcgtgcgtattgtcgaagagctgttgcgcggcgaaatgagccagcgtgagttaaaaaatgaactcggcgcaggcatcgcgacgattacgcgtggatctaacagcctgaaagccgcgcccgtcgagctgcgccagtggctggaagaggtgttgctgaaaagcgattgattttgtaggcctgataagacgtggcgcatcaggcatcgtgcaccgaatgccggatgcggcgtgaacgccttatccgtcctacaaatacccgtaatttcaatatgtttggtaggcatgataagacgcggcagcgtcgcatcaggcgcttaatacacggcattatgaaacggactcagcgccaggatcaccgcctggtgatagacgctggcgcgagtgagtttcccggcggtaaacacgccgatcgccccttccttacgaccaatctcatcaataccggtataacggctcatcacgggaccaagcgcctcaccttcacgcactttttccagaatcaccgcaggcaacggcaaagtagcgctacgcgcctcgccgcgctggctggcgttttcaatcaccacccaactgaaagtgctgtcaccatcgatgccagcttcaatcgccacccaaaaatcagcctctggaagtaaacggcgggcattggctacccgatttcgtgcgccagcgcgcgtttcctcactgccaaagggctgttccggtacaccgctctcgacggcaacggatgcaatatggcaggatccttcgccgaagatctcgtgaaatgcctgcagaatggcctgaattttagcgggattggtggtcgcacagacaacttggtgcataatcagcattactcagaaaattaacgttacagcagtatacggaaaaaaagcatgttacaggtatacctagtccgccacggtgaaacgcagtggaacgccgagcgacgtattcagggccagtctgacagcccgctgaccgccaaaggtgagcaacaggcgatgcaggtggcaacccgtgccaaagagcttggcattacgcatatcatcagtagcgatttaggacgcacccggcgtacggcggaaatcatcgcccaggcctgcggctgtgacatcatctttgattctcgcctgcgtgaattaaacatgggtgtgctggaaaaaagacatatcgattctctgaccgaagaagaagagaactggcgtcggcagctggtcaatggcaccgttgacgggcgtattcctgaaggcgagagtatgcaggagctcagcgatcgcgtcaatgcggcactggaatcttgccgggacttaccgcagggaagccgaccgctgctggtgagtcatggtattgcactgggatgcctggtgagtacgattctcggattaccagcatgggcagagcgccgcttacgtctgcgtaactgttctattagccgcgtggattatcaggaaagcctgtggctggcgtctggctgggtcgttgaaaccgcaggggacatcagccatctggacgcccctgcattagatgagctgcagcgttaacgacggatcggaatcagcagttcacagcgtagattaattgggcgatctcccgctttggcatcttctgccgggtagtatcgctcaatatcctgacctttacggcgcgtcaggttgagcattggcatgcacgttccgtataccgtcaggataaactcctgcacgccggttcccagaccttcataggtaaacatcacatattcgccgccctgcagcatcaccggatgccccgtcagtacatagccatctgcctgatcctgggctaacgcggtggtatagaatacctcttgctcgtcgtctttatcctgactcggacgcgtttcattcaggccgtagagcaccggcggaatggtcggcgcgttgccgagaaaatcgtgccagaactgataacgcatttcatggcggaaatcagagatttgctccaggctacaggagtagctctgggtaacaccaatcagcggcgtatcttccagggtgacaaatttgtgctctggcatagtgaattcacccaggcgtagcggcgggcgaataccaaaggcgctccattcaggagaacggcggtaaagtgcaggagtctgggcaaactgcttcttgaatgcgcgggtaaatgtctgttgagagtcgaagcggtattgcagcgcgatgtccagaatcggacgcgcagtcaggcgtagtgcgaccgcgcttttgctcaaacgacgagcacgaatatacgcgccaatagcatggccagtgacatctttaaacattctctgtaagtgccacttggaataacctgctttcgccgctacattgtcgaggctcaggggctgatccagatgaccttccagccagattaaaaggtcgcgaataatgccggcctgatccataaaatatcctcatcctttcaacaacgagcacctgacatcaggtaattggataatagcattttttgctgttttagcattcagtgtttttttcttagtagagtatgttttagggcttgacggaaataaaagtattgagattttgttcttaatcaatatgttatttaccgtgacgaactaattgctcgtgtaatagataaaaatggtaacaatatgaaatacaagcatttgatcctgtctttaagcctgataatgctggggccattggctcatgcagaagagattggtagcgtcgacaccgtatttaaaatgatcggcccggatcacaaaattgttgtggaagcctttgatgatcccgatgtgaaaaatgtcacctgttatgtgagccgggcgaaaaccggtggtattaaagggggattgggtctggcggaagatacctccgatgcggccatttcttgtcagcaagtcgggccgattgaactgagcgatcgtattaaaaacggcaaagctcagggcgaggtagtattcaaaaaacgcacgtccctggtctttaagagcttacaggtcgtgcgcttttatgatgccaaacgcaacgcgctcgcttatctggcttactccgacaaagttgtagaaggtagcccgaaaaacgcgattagcgcggttcctgtcatgccgtggcggcaataacagaggcgatttatgcaacgggaaacggtctggttagtggaagatgagcaagggatagccgacacgctggtctacatgttgcagcaggaaggttttgccgtcgaggtctttgagcgaggcttgccggtgctggataaagctcgcaagcaggtacccgacgtcatgattctcgatgttggtctgccggatattagcggctttgaattgtgccgccagttactggcgctccatccggcgttacctgtactgttcctgacggcccgaagtgaagaggtcgatcgcctgcttgggctggaaattggtgctgacgactacgtggctaaaccgtttagtccccgcgaagtgtgcgccagggtgcgcaccttactgcgtcgggtgaagaagttcagcacgccgtctcccgtcatccgtattggacattttgaattgaatgaacccgcggcgcagatcagctggtttgacacgccattagcgctgactcggtatgagtttttattgttgaagacgttactcaagagtccgggccgcgtctggtcccgccagcaactgatggatagcgtatgggaagatgcgcaggacacctacgatcgcaccgtcgatacccacattaaaacgctgcgtgccaagctgcgcgccatcaaccccgatcttagtccgattaatactcatcgcggcatgggatatagcctgaggggcctgtaatgcgtatcggcatgcggttgttgctgggctattttttactggtggcggtggcagcctggttcgtactggccatttttgtcaaagaagttaaaccgggcgtgcgaagagcaacggaggggacgttgatcgacaccgcaacgttgctggcggagctggcgcgtcccgatttgctctctggggacccaacgcatgggcaactggcgcaggcgtttaatcagctacaacatcgcccgtttcgcgccaatatcggtggcattaacaaagtgcgcaatgaatatcatgtctatatgaccgatgcgcagggcaaagtattgttcgatagcgcaaataaagccgttggacaggattatagccgctggaatgacgtctggctaacgttgcgtggtcagtatggtgcgcgcagcacgttgcaaaatcctgccgatcccgaaagttctgtgatgtatgttgccgcaccgattatggacggcagccggcttattggcgttttgagcgtaggcaaaccgaacgcggcgatggctccggtcattaagcgtagcgagcggcgaattttatgggccagcgccattttgttggggattgcactggtgattggcgcaggcatggtttggtggatcaaccgctctattgcccggctcactcgctatgctgattccgtcactgacaataagcccgttcctctccccgatctcggtagtagcgagttgcgtaaactcgcgcaggcgctggaaagtatgcgcgtgaagctggaagggaaaaactatattgagcagtatgtttacgcattaactcatgagctaaaaagcccactggcggcgattcgtggagcggcggaaattttacgcgaaggtccgccgccggaagtggtggctcgttttactgacaacattctgacgcaaaatgcgcgtatgcaggcattggtagaaacgttactacgccaggcaagactggagaatcgtcaggaagtcgttctgactgctgttgatgtggcggcattattccgccgcgtcagcgaagcgcgcaccgtgcagttggcagaaaaaaaaatcactctgcatgttacgcccaccgaggttaacgttgctgctgaaccggcgttactggagcaggcgctgggaaatttactggataacgccatcgattttacccccgagagcggttgcatcacgctaagcgccgaagtggatcaggaacacgtcacgcttaaggtgctggataccggtagtggtattcctgactacgcgcttagtcgtatttttgaacgcttttactctttgcctcgtgcaaatgggcaaaaaagcagcggtctggggttggcgttcgtcagtgaggtcgcccgtttgtttaacggcgaagtcacgctgcgcaacgtgcaggaaggtggcgtgctggccagccttcgacttcaccgtcacttcacataacttcaaattcttcccacatagtcttcgtatcctgctgccattgcaaaggagaagactatgttgaaatcccccctgttctggaaaatgactagcctgtttggtgcagtattgctgttgttgattccgataatgctgattcggcaggtgattgtcgaacgtgctgattaccgtagcgatgtggaagatgcgattcgccaaagtaccagcgggccgcaaaaactcgttgggccgctcatcgctattcctgtgaccgagctttatacggtgcaggaagaggataaaaccgtggagcggaaacgaagttttatccatttttggttacctgagagtttgatggttgatggcaatcagaacgtggaagaacgcaagatagggatttataccggtcaggtctggcacagtgatttaacgttaaaagccgatttcgatgttagccgtcttagcgaactcaacgcgccaaatatcaccttaggcaagccatttattgtgattagcgtcggggatgcgcgtggtattggtgtggtgaaagcgcctgaagttaacggaacggcgctgaccattgaacccggcaccgggttagagcaaggcgggcagggcgtgcatatccctttacctgaaggggactggcggaagcagaacctgaagctgaatatggccctgaatttaagcggtaccggcgatctttctgtggtgcctggcgggcgtaatagcgaaatgaccttaaccagcaactggccgcatcccagttttttaggtgattttctaccagccaaacgggaagttagcgagagtggttttcaggcgcactggcaaagcagctggtttgctaataatctcggtgagcgttttgctagtggcaatgataccggctgggaaaacttcccggcgtttagcgtcgcagtaacgacgccagccgatcaataccaattaactgaccgggcgactaagtacgccattctgctgattgcactgacttttatggcgttctttgtttttgaaacgctcaccgcgcaacgtttacacccaatgcaatatttgctggtggggcttagtttggtgatgttttatttgctcttgctggcgctttctgaacataccggttttaccgtggcatggataatcgccagtctgattggggcgataatgaacggtatttatttgcaagcggtattgaaaggttggtgcaacagcatgttgtttaccctcgcgctgttgttgctggatggtgtgatgtggggactgctcaactctgccgatagcgcgctgttgttgggaaccagtgtgctggtggtggcgctggccggcatgatgtttgtgacccgtaatatcgactggtatgcgtttagtctgccgaaaatgaaagccagtaaagaagttacaacggacgatgagttacgtatctggaaataaggttgaaaaataaaaacggcgctaaaaagcgccgttttttttgacggtggtaaagccgattaatcttccagatcaccgcagaagcgataaccttcaccgtgaatggtggcgatgatttccggcgtatccggcgtagattcgaaatgtttacgaatacggcggatcgtcacgtctacagtacggtcgtgcggtttcagctcacggccggtcattttcttcagcagttcagcacgggactgaattttgcctgggttttcacagaagtgaagcatggcgcggaactcgctgcgcggcagcttgtactgctcgccatcagggccgatcaagctacggctgttgatgtccagttcccaaccattgaacttgtagctttcaacgctacgacgttcttcgctgacagtacccagattcatggtacgggacagtaggttgcgtgcacgaatcgtcagttcacgcgggttgaacggtttggtgatgtagtcatctgcaccgatttcgaggccgagaattttatcgacttcgttgtcacggccagtcaggaacatcaacgcaacattcgcctgctcgcgcagttcacgcgctaacagaagaccgttcttacccggcagattgatatccatgatcaccaggttgatgtcatattcagagaggatctgatgcatttccgcgccatctgtcgcttcgaaaacatcatagccttccgcttcgaaaatacttttcaacgtgttgcgtgttaccaactcgtcttcaacgataagaatgtgcggggtctgcatgtttgctacctaaattgccaactaaatcgaaacaggaagtacaaaagtccctgacctgcctgatgcatgctgcaaattaacatgatcggcgtaacatgactaaagtacgtaattgcgttcttgatgcactttccatcaacgtcaacaacatcattagcttggtcgtgggtactttccctcaggacccgacagtgagtaaaacggctgtcatcctaaccattttaacagcaacataacaggctaagaggggccggacacccaataaaactacgcttcgttgacatatatcaagttcaattgtagcacgttaacagtttgatgaaatcatcgtatctaaatgctagctttcgtcacattattttaataatccaactagttgcatcatacaactaataaacgtggtgaatccaattgtcgagatttattttttataaaattatcctaagtaaacagaaggatatgtagcattttttaacaactcaaccgttagtacagtcaggaaatagtttagccttttttaagctaagtaaagggctttttctgcgacttacgttaagaatttgtaaattcgcaccgcgtaataagttgacagtgatcacccggttcgcggttatttgatcaagaagagtggcaatatgcgtataacgattattctggtcgcacccgccagagcagaaaatattggggcagcggcgcgggcaatgaaaacgatggggtttagcgatctgcggattgtcgatagtcaggcacacctggagccagccacccgctgggtcgcacatggatctggtgatattattgataatattaaagttttcccgacattggctgaaagcttacacgatgtcgatttcactgtcgccaccactgcgcgcagtcgggcgaaatatcattactacgccacgccagttgaactggtgccgctgttagaggaaaaatctagttggatgagccatgccgcgctggtgtttggtcgcgaagattccgggttgactaacgaagagttagcgttggctgacgttcttactggtgtgccgatggtggcggattatcctagcctcaatctggggcaggcggtgatggtctattgctatcaattagcaacattaatacaacaaccggcgaaaagtgatgcaacggcagaccaacatcaactgcaagctttacgcgaacgagccatgacattgctgacgactctggcagtggcagatgacataaaactggtcgactggttacaacaacgcctggggcttttagagcaacgagacacggcaatgttgcaccgtttgctgcatgatattgaaaaaaatatcaccaaataaaaaacgccttagtaagtatttttc
